(19) United States
(12) Patent Application Publication
(10) Pub. No.: US 2022/0307010 A1
(43) Pub. Date: Sep. 29, 2022

(54) VARIANT NUCLEIC ACID LIBRARIES FOR TIGIT

(71) Applicant: Twist Bioscience Corporation, South San Francisco, CA (US)

(72) Inventors: Aaron SATO, Burlingame, CA (US); Qiang LIU, Palo Alto, CA (US); Tom YUAN, San Francisco, CA (US)

(21) Appl. No.: 17/702,643

(22) Filed: Mar. 23, 2022

Related U.S. Application Data
(60) Provisional application No. 63/165,651, filed on Mar. 24, 2021.

(51) Int. Cl. C12N 15/10; A61P 35/00; C07K 16/28

(52) U.S. Cl. CPC C12N 15/1044; A61P 35/00; C07K 16/28; C07K 2317/92; C07K 2317/76; A61K 2039/505

(57) ABSTRACT

Provided herein are methods and compositions relating to TIGIT libraries having nucleic acids encoding for a scaffold comprising a TIGIT domain. TIGIT libraries described herein encode for immunoglobulins such as antibodies.

### CROSS-REFERENCE

[0001] This application claims the benefit of U.S. Provisional Patent Application No. 63/165,651 filed on Mar. 24, 2021, which is incorporated by reference in its entirety.

### SEQUENCE LISTING

[0002] The instant application contains a Sequence Listing which has been submitted electronically in ASCII format and is hereby incorporated by reference in its entirety. Said ASCII copy, created on May 5, 2022, is named 44854-819_201_SL.txt and is 1,459,676 bytes in size.

### BACKGROUND

[0003] TIGIT (formally known as T cell immunoreceptor with immunoglobulin and ITIM domains) regulates T-cell mediated immunity. TIGIT has been implicated in various diseases and disorders and therapeutic antibodies targeting TIGIT have clinical significance. Antibodies possess the capability to bind with high specificity and affinity to biological targets. However, the design of therapeutic antibodies is challenging due to balancing of immunological effects with efficacy. Thus, there is a need to develop compositions and methods for generation of antibodies for use in therapeutics.

### INCORPORATION BY REFERENCE

[0004] All publications, patents, and patent applications mentioned in this specification are herein incorporated by reference to the same extent as if each individual publication, patent, or patent application was specifically and individually indicated to be incorporated by reference.

### BRIEF SUMMARY

[0005] Provided herein are antibodies or antibody fragments comprising an amino acid sequence at least about 90% identical to that set forth in any one of SEQ ID NOs: 35-44 or 62-2238. In some embodiments, the antibody or antibody fragment comprises an amino acid sequence at least about 95% identical to that set forth in any one of SEQ ID NOs: 35-44 or 62-2238. In some embodiments, the antibody or antibody fragment comprises an amino acid sequence as set forth in any one of SEQ ID NOs: 35-44. In some embodiments, the antibody is a monoclonal antibody, a polyclonal antibody, a bi-specific antibody, a multispecific antibody, a grafted antibody, a human antibody, a humanized antibody, a synthetic antibody, a chimeric antibody, a camelized antibody, a single-chain Fvs (scFv), a single chain antibody, a Fab fragment, a F(ab')2 fragment, a Fd fragment, a Fv fragment, a single-domain antibody, an isolated complementarity determining region (CDR), a diabody, a fragment comprised of only a single monomeric variable domain, disulfide-linked Fvs (sdFv), an intrabody, an anti-idiotypic (anti-Id) antibody, or ab antigen-binding fragments thereof. In some embodiments, the antibody or antibody fragment binds to TIGIT with a K_{D} of less than 75 nM. In some embodiments, the antibody or antibody fragment binds to TIGIT with a K_{D} of less than 50 nM. In some embodiments, the antibody or antibody fragment binds to TIGIT with a K_{D} of less than 25 nM. In some embodiments, the antibody or antibody fragment binds to TIGIT with a K_{D} of less than 10 nM.

[0006] Provided herein are antibodies or antibody fragments that binds TIGIT, comprising an immunoglobulin heavy chain comprising an amino acid sequence at least about 90% identical to that set forth in any one of SEQ ID NOs: 35-44. In some embodiments, the immunoglobulin heavy chain comprises an amino acid sequence at least about 95% identical to that set forth in any one of SEQ ID NOs: 35-44. In some embodiments, the immunoglobulin heavy chain comprises an amino acid sequence as set forth in any one of SEQ ID NOs: 35-44 or 62-2238. In some embodiments, the antibody is a monoclonal antibody, a polyclonal antibody, a bi-specific antibody, a multispecific antibody, a grafted antibody, a human antibody, a humanized antibody, a synthetic antibody, a chimeric antibody, a camelized antibody, a single-chain Fvs (scFv), a single chain antibody, a Fab fragment, a F(ab')2 fragment, a Fd fragment, a Fv fragment, a single-domain antibody, an isolated complementarity determining region (CDR), a diabody, a fragment comprised of only a single monomeric variable domain, disulfide-linked Fvs (sdFv), an intrabody, an anti-idiotypic (anti-Id) antibody, or ab antigen-binding fragments thereof. In some embodiments, the antibody or antibody fragment thereof is chimeric or humanized. In some embodiments, the antibody or antibody fragment binds to TIGIT with a K_{D} of less than 75 nM. In some embodiments, the antibody or antibody fragment binds to TIGIT with a K_{D} of less than 50 nM. In some embodiments, the antibody or antibody fragment binds to TIGIT with a K_{D} of less than 25 nM. In some embodiments, the antibody or antibody fragment binds to TIGIT with a K_{D} of less than 10 nM.

[0007] Provided herein are methods of treating cancer comprising administering the antibodies or antibody fragments described herein.

[0008] Provided herein are methods of treating a viral infection comprising administering the antibodies or antibody fragments described herein.

### BRIEF DESCRIPTION OF THE DRAWINGS

[0009] FIG. 1 presents a diagram of steps demonstrating an exemplary process workflow for gene synthesis as disclosed herein.

[0010] FIG. 2 illustrates an example of a computer system.

[0011] FIG. 3 is a block diagram illustrating an architecture of a computer system.

[0012] FIG. 4 is a diagram demonstrating a network configured to incorporate a plurality of computer systems, a plurality of cell phones and personal data assistants, and Network Attached Storage (NAS).

[0013] FIG. 5 is a block diagram of a multiprocessor computer system using a shared virtual address memory space.

[0014] FIGS. 6-7 depicts a graph of TIGIT affinity distribution for the VHH libraries, depicting either the affinity threshold from 20 to 4000 (FIG. 6) or the affinity threshold from 20 to 1000 (FIG. 7). Out of 140 VHH binders, 51 variants were <100 nM and 90 variants were <200 nM.

[0015] FIGS. 8A-8C depict graphs of CDR3 counts per length for ‘VHH library,’ (FIG. 8A) ‘VHH shuffle’ library (FIG. 8B), and ‘VHH hShuffle library’ (FIG. 8C).

[0016] FIG. 9 depicts a graph of a TIGIT:CD155 blockade assay for TIGIT VHH Fc binders. Concentration of the TIGIT VHH Fc binders in nanomolar (nM) is on the x-axis and relative HRP signal is on the y-axis.

[0017] FIG. 10A depicts a schema of the VHH libraries described herein. Figure discloses SEQ ID NO: 2244.

[0018] FIG. 10B depicts a schema of design of phage-displayed hyperimmune libraries generated herein.

[0019] FIGS. 11A-11B depict heavy chain CDR length distribution of the hyperimmune libraries as assessed by next generation sequencing. FIG. 11A depicts a graph of CDR3 counts per length. FIG. 11B depicts graphs of CDRH1, CDRH2, and CDRH3 lengths.

[0020] FIG. 12 depicts a schema of the workflow of selection of soluble protein targets.

[0021] FIGS. 13A-13D depict graphs of data from hTIGIT ELISA after Round 3 and Round 4 of panning.

[0022] FIGS. 13E-13F depict schemas of CDRH3 length, yield, and affinity (K_{D} ) for the hTIGIT immunoglobulins.

[0023] FIGS. 14A-14AA depict median fluorescence intensity from flow cytometry data.

### DETAILED DESCRIPTION

[0024] The present disclosure employs, unless otherwise indicated, conventional molecular biology techniques, which are within the skill of the art. Unless defined otherwise, all technical and scientific terms used herein have the same meaning as is commonly understood by one of ordinary skill in the art.

### Definitions

[0025] Throughout this disclosure, various embodiments are presented in a range format. It should be understood that the description in range format is merely for convenience and brevity and should not be construed as an inflexible limitation on the scope of any embodiments. Accordingly, the description of a range should be considered to have specifically disclosed all the possible subranges as well as individual numerical values within that range to the tenth of the unit of the lower limit unless the context clearly dictates otherwise. For example, description of a range such as from 1 to 6 should be considered to have specifically disclosed subranges such as from 1 to 3, from 1 to 4, from 1 to 5, from 2 to 4, from 2 to 6, from 3 to 6 etc., as well as individual values within that range, for example, 1.1, 2, 2.3, 5, and 5.9. This applies regardless of the breadth of the range. The upper and lower limits of these intervening ranges may independently be included in the smaller ranges, and are also encompassed within the disclosure, subject to any specifically excluded limit in the stated range. Where the stated range includes one or both of the limits, ranges excluding either or both of those included limits are also included in the disclosure, unless the context clearly dictates otherwise.

[0026] The terminology used herein is for the purpose of describing particular embodiments only and is not intended to be limiting of any embodiment. As used herein, the singular forms “a,” “an” and “the” are intended to include the plural forms as well, unless the context clearly indicates otherwise. It will be further understood that the terms “comprises” and/or “comprising,” when used in this specification, specify the presence of stated features, integers, steps, operations, elements, and/or components, but do not preclude the presence or addition of one or more other features, integers, steps, operations, elements, components, and/or groups thereof. As used herein, the term “and/or” includes any and all combinations of one or more of the associated listed items.

[0027] Unless specifically stated or obvious from context, as used herein, the term “about” in reference to a number or range of numbers is understood to mean the stated number and numbers +/− 10% thereof, or 10% below the lower listed limit and 10% above the higher listed limit for the values listed for a range.

[0028] Unless specifically stated, as used herein, the term “nucleic acid” encompasses double- or triple-stranded nucleic acids, as well as single-stranded molecules. In double- or triple-stranded nucleic acids, the nucleic acid strands need not be coextensive (i.e., a double-stranded nucleic acid need not be double-stranded along the entire length of both strands). Nucleic acid sequences, when provided, are listed in the 5′ to 3′ direction, unless stated otherwise. Methods described herein provide for the generation of isolated nucleic acids. Methods described herein additionally provide for the generation of isolated and purified nucleic acids. A “nucleic acid” as referred to herein can comprise at least 5, 10, 20, 30, 40, 50, 60, 70, 80, 90, 100, 125, 150, 175, 200, 225, 250, 275, 300, 325, 350, 375, 400, 425, 450, 475, 500, 600, 700, 800, 900, 1000, 1100, 1200, 1300, 1400, 1500, 1600, 1700, 1800, 1900, 2000, or more bases in length. Moreover, provided herein are methods for the synthesis of any number of polypeptide-segments encoding nucleotide sequences, including sequences encoding non-ribosomal peptides (NRPs), sequences encoding non-ribosomal peptide-synthetase (NRPS) modules and synthetic variants, polypeptide segments of other modular proteins, such as antibodies, polypeptide segments from other protein families, including non-coding DNA or RNA, such as regulatory sequences e.g. promoters, transcription factors, enhancers, siRNA, shRNA, RNAi, miRNA, small nucleolar RNA derived from microRNA, or any functional or structural DNA or RNA unit of interest. The following are non-limiting examples of polynucleotides: coding or non-coding regions of a gene or gene fragment, intergenic DNA, loci (locus) defined from linkage analysis, exons, introns, messenger RNA (mRNA), transfer RNA, ribosomal RNA, short interfering RNA (siRNA), short-hairpin RNA (shRNA), micro-RNA (miRNA), small nucleolar RNA, ribozymes, complementary DNA (cDNA), which is a DNA representation of mRNA, usually obtained by reverse transcription of messenger RNA (mRNA) or by amplification; DNA molecules produced synthetically or by amplification, genomic DNA, recombinant polynucleotides, branched polynucleotides, plasmids, vectors, isolated DNA of any sequence, isolated RNA of any sequence, nucleic acid probes, and primers. cDNA encoding for a gene or gene fragment referred herein may comprise at least one region encoding for exon sequences without an intervening intron sequence in the genomic equivalent sequence.

### Antibody Libraries

[0029] Provided herein are methods, compositions, and systems for generation of antibodies for TIGIT. Methods, compositions, and systems described herein for the optimization of antibodies comprise a ratio-variant approach that mirror the natural diversity of antibody sequences. In some instances, libraries of optimized antibodies comprise variant antibody sequences. In some instances, the variant antibody sequences are designed comprising variant CDR regions. In some instances, the variant antibody sequences comprising variant CDR regions are generated by shuffling the natural CDR sequences in a llama, humanized, or chimeric framework. In some instances, such libraries are synthesized, cloned into expression vectors, and translation products (antibodies) evaluated for activity. In some instances, fragments of sequences are synthesized and subsequently assembled. In some instances, expression vectors are used to display and enrich desired antibodies, such as phage display. In some instances, the phage vector is a Fab phagemid vector. Selection pressures used during enrichment in some instances includes binding affinity, toxicity, immunological tolerance, stability, or other factor. Such expression vectors allow antibodies with specific properties to be selected (“panning”), and subsequent propagation or amplification of such sequences enriches the library with these sequences. Panning rounds can be repeated any number of times, such as 1, 2, 3, 4, 5, 6, 7, or more than 7 rounds. In some instances, each round of panning involves a number of washes. In some instances, each round of panning involves at least or about 1, 2, 3, 4, 5, 6, 7, 8, 9, 10, 11, 12, 13, 14, 15, 16, or more than 16 washes.

[0030] Described herein are methods and systems of in-silico library design. Libraries as described herein, in some instances, are designed based on a database comprising a variety of antibody sequences. In some instances, the database comprises a plurality of variant antibody sequences against various targets. In some instances, the database comprises at least 100, 500, 1000, 1500, 2000, 2500, 3000, 3500, 4000, 4500, 5000, or more than 5000 antibody sequences. An exemplary database is an iCAN database. In some instances, the database comprises naïve and memory B-cell receptor sequences. In some instances, the naïve and memory B-cell receptor sequences are human, mouse, or primate sequences. In some instances, the naïve and memory B-cell receptor sequences are human sequences. In some instances, the database is analyzed for position specific variation. In some instances, antibodies described herein comprise position specific variations in CDR regions. In some instances, the CDR regions comprise multiple sites for variation.

[0031] Described herein are libraries comprising variation in a CDR region. In some instances, the CDR is CDR1, CDR2, or CDR3 of a variable domain of heavy chain. In some instances, the CDR is CDR1, CDR2, or CDR3 of a variable domain of light chain. In some instances, the libraries comprise multiple variants encoding for CDR1, CDR2, or CDR3. In some instances, the libraries as described herein encode for at least 50, 100, 200, 300, 400, 500, 1000, 1200, 1500, 1700, 2000, 2500, 3000, 3500, 4000, 4500, 5000, or more than 5000 CDR1 sequences. In some instances, the libraries as described herein encode for at least 50, 100, 200, 300, 400, 500, 1000, 1200, 1500, 1700, 2000, 2500, 3000, 3500, 4000, 4500, 5000, or more than 5000 CDR2 sequences. In some instances, the libraries as described herein encode for at least 50, 100, 200, 300, 400, 500, 1000, 1200, 1500, 1700, 2000, 2500, 3000, 3500, 4000, 4500, 5000, or more than 5000 CDR3 sequences. In-silico antibodies libraries are in some instances synthesized, assembled, and enriched for desired sequences.

[0032] Following synthesis of CDR1 variants, CDR2 variants, and CDR3 variants, in some instances, the CDR1 variants, the CDR2 variants, and the CDR3 variants are shuffled to generate a diverse library. In some instances, the diversity of the libraries generated by methods described herein have a theoretical diversity of at least or about 10⁷, 10⁸, 10⁹, 10¹⁰, 10¹¹, 10¹², 10¹³, 10¹⁴, 10¹⁵, 10¹⁶, 10¹⁷, 10¹⁸, or more than 10¹⁸ sequences. In some instances, the library has a final library diversity of at least or about 10⁷, 10⁸, 10⁹, 10¹⁰, 10¹¹, 10¹², 10¹³, 10¹⁴, 10¹⁵, 10¹⁶, 10¹⁷, 10¹⁸, or more than 10¹⁸ sequences.

[0033] The germline sequences corresponding to a variant sequence may also be modified to generate sequences in a library. For example, sequences generated by methods described herein comprise at least 1, 2, 3, 4, 5, 6, 7, 8, 9, 10, 11, 12, 13, 14, 15, 16, or more than 16 mutations from the germline sequence. In some instances, sequences generated comprise no more than 1, 2, 3, 4, 5, 6, 7, 8, 9, 10, 11, 12, 13, 14, 15, 16, or no more than 18 mutations from the germline sequence. In some instances, sequences generated comprise about 1, 2, 3, 4, 5, 6, 7, 8, 9, 10, 11, 12, 13, 14, 15, 16, or about 18 mutations relative to the germline sequence.

[0034] Antibody Libraries

[0035] Provided herein are libraries generated from methods described herein. Antibodies described herein result in improved functional activity, structural stability, expression, specificity, or a combination thereof. In some instances, the antibody is a single domain antibody. In some instances, the single domain antibody comprises one variable domain of heavy chain. In some instances, the single domain antibody is a VHH antibody.

[0036] As used herein, the term antibody will be understood to include proteins having the characteristic two-armed, Y-shape of a typical antibody molecule as well as one or more fragments of an antibody that retain the ability to specifically bind to an antigen. Exemplary antibodies include, but are not limited to, a monoclonal antibody, a polyclonal antibody, a bi-specific antibody, a multispecific antibody, a grafted antibody, a human antibody, a humanized antibody, a synthetic antibody, a chimeric antibody, a camelized antibody, a single-chain Fvs (scFv) (including fragments in which the VL and VH are joined using recombinant methods by a synthetic or natural linker that enables them to be made as a single protein chain in which the VL and VH regions pair to form monovalent molecules, including single chain Fab and scFab), a single chain antibody, a Fab fragment (including monovalent fragments comprising the VL, VH, CL, and CH1 domains), a F(ab')2 fragment (including bivalent fragments comprising two Fab fragments linked by a disulfide bridge at the hinge region), a Fd fragment (including fragments comprising the VH and CH1 fragment), a Fv fragment (including fragments comprising the VL and VH domains of a single arm of an antibody), a single-domain antibody (dAb or sdAb) (including fragments comprising a VH domain), an isolated complementarity determining region (CDR), a diabody (including fragments comprising bivalent dimers such as two VL and VH domains bound to each other and recognizing two different antigens), a fragment comprised of only a single monomeric variable domain, disulfide-linked Fvs (sdFv), an intrabody, an anti-idiotypic (anti-Id) antibody, or ab antigen-binding fragments thereof. In some instances, the libraries disclosed herein comprise nucleic acids encoding for an antibody, wherein the antibody is a Fv antibody, including Fv antibodies comprised of the minimum antibody fragment which contains a complete antigen-recognition and antigen-binding site. In some embodiments, the Fv antibody consists of a dimer of one heavy chain and one light chain variable domain in tight, non-covalent association, and the three hypervariable regions of each variable domain interact to define an antigen-binding site on the surface of the VH-VL dimer. In some embodiments, the six hypervariable regions confer antigen-binding specificity to the antibody. In some embodiments, a single variable domain (or half of an Fv comprising only three hypervariable regions specific for an antigen, including single domain antibodies isolated from camelid animals comprising one variable domain of heavy chain such as VHH antibodies or nanobodies) has the ability to recognize and bind antigen. In some instances, the libraries disclosed herein comprise nucleic acids encoding for an antibody, wherein the antibody is a single-chain Fv or scFv, including antibody fragments comprising a VH, a VL, or both a VH and VL domain, wherein both domains are present in a single polypeptide chain. In some embodiments, the Fv polypeptide further comprises a polypeptide linker between the VH and VL domains allowing the scFv to form the desired structure for antigen binding. In some instances, a scFv is linked to the Fc fragment or a VHH is linked to the Fc fragment (including minibodies). In some instances, the antibody comprises immunoglobulin molecules and immunologically active fragments of immunoglobulin molecules, e.g., molecules that contain an antigen binding site. Immunoglobulin molecules are of any type (e.g., IgG, IgE, IgM, IgD, IgA and IgY), class (e.g., IgG 1, IgG 2, IgG 3, IgG 4, IgA 1 and IgA 2) or subclass.

[0037] In some embodiments, libraries comprise immunoglobulins that are adapted to the species of an intended therapeutic target. Generally, these methods include “mammalization” and comprises methods for transferring donor antigen-binding information to a less immunogenic mammal antibody acceptor to generate useful therapeutic treatments. In some instances, the mammal is mouse, rat, equine, sheep, cow, primate (e.g., chimpanzee, baboon, gorilla, orangutan, monkey), dog, cat, pig, donkey, rabbit, and human. In some instances, provided herein are libraries and methods for felinization and caninization of antibodies.

[0038] “Humanized” forms of non-human antibodies can be chimeric antibodies that contain minimal sequence derived from the non-human antibody. A humanized antibody is generally a human antibody (recipient antibody) in which residues from one or more CDRs are replaced by residues from one or more CDRs of a non-human antibody (donor antibody). The donor antibody can be any suitable non-human antibody, such as a mouse, rat, rabbit, chicken, or non-human primate antibody having a desired specificity, affinity, or biological effect. In some instances, selected framework region residues of the recipient antibody are replaced by the corresponding framework region residues from the donor antibody. Humanized antibodies may also comprise residues that are not found in either the recipient antibody or the donor antibody. In some instances, these modifications are made to further refine antibody performance.

[0039] “Caninization” can comprise a method for transferring non-canine antigen-binding information from a donor antibody to a less immunogenic canine antibody acceptor to generate treatments useful as therapeutics in dogs. In some instances, caninized forms of non-canine antibodies provided herein are chimeric antibodies that contain minimal sequence derived from non-canine antibodies. In some instances, caninized antibodies are canine antibody sequences (“acceptor” or “recipient” antibody) in which hypervariable region residues of the recipient are replaced by hypervariable region residues from a non-canine species (“donor” antibody) such as mouse, rat, rabbit, cat, dogs, goat, chicken, bovine, horse, llama, camel, dromedaries, sharks, non-human primates, human, humanized, recombinant sequence, or an engineered sequence having the desired properties. In some instances, framework region (FR) residues of the canine antibody are replaced by corresponding non-canine FR residues. In some instances, caninized antibodies include residues that are not found in the recipient antibody or in the donor antibody. In some instances, these modifications are made to further refine antibody performance. The caninized antibody may also comprise at least a portion of an immunoglobulin constant region (Fc) of a canine antibody.

[0040] “Felinization” can comprise a method for transferring non-feline antigen-binding information from a donor antibody to a less immunogenic feline antibody acceptor to generate treatments useful as therapeutics in cats. In some instances, felinized forms of non-feline antibodies provided herein are chimeric antibodies that contain minimal sequence derived from non-feline antibodies. In some instances, felinized antibodies are feline antibody sequences (“acceptor” or “recipient” antibody) in which hypervariable region residues of the recipient are replaced by hypervariable region residues from a non-feline species (“donor” antibody) such as mouse, rat, rabbit, cat, dogs, goat, chicken, bovine, horse, llama, camel, dromedaries, sharks, non-human primates, human, humanized, recombinant sequence, or an engineered sequence having the desired properties. In some instances, framework region (FR) residues of the feline antibody are replaced by corresponding non-feline FR residues. In some instances, felinized antibodies include residues that are not found in the recipient antibody or in the donor antibody. In some instances, these modifications are made to further refine antibody performance. The felinized antibody may also comprise at least a portion of an immunoglobulin constant region (Fc) of a felinize antibody.

[0041] Methods as described herein may be used for generation of libraries encoding a non-immunoglobulin. In some instances, the libraries comprise antibody mimetics. Exemplary antibody mimetics include, but are not limited to, anticalins, affilins, affibody molecules, affimers, affitins, alphabodies, avimers, atrimers, DARPins, fynomers, Kunitz domain-based proteins, monobodies, anticalins, knottins, armadillo repeat protein-based proteins, and bicyclic peptides.

[0042] Libraries described herein comprising nucleic acids encoding for an antibody comprise variations in at least one region of the antibody. Exemplary regions of the antibody for variation include, but are not limited to, a complementarity-determining region (CDR), a variable domain, or a constant domain. In some instances, the CDR is CDR1, CDR2, or CDR3. In some instances, the CDR is a heavy domain including, but not limited to, CDRH1, CDRH2, and CDRH3. In some instances, the CDR is a light domain including, but not limited to, CDRL1, CDRL2, and CDRL3. In some instances, the variable domain is variable domain of light chain (VL) or variable domain of heavy chain (VH). In some instances, the CDR1, CDR2, or CDR3 is of a variable domain of light chain (VL). CDR1, CDR2, or CDR3 of a variable domain of light chain (VL) can be referred to as CDRL1, CDRL2, or CDRL3, respectively. CDR1, CDR2, or CDR3 of a variable domain of heavy chain (VH) can be referred to as CDRH1, CDRH2, or CDRH3, respectively. In some instances, the VL domain comprises kappa or lambda chains. In some instances, the constant domain is constant domain of light chain (CL) or constant domain of heavy chain (CH).

[0043] Provided herein are libraries comprising nucleic acids encoding for an antibody comprising variation in at least one region of the antibody, wherein the region is the CDR region. In some instances, the antibody is a single domain antibody comprising one variable domain of heavy chain such as a VHH antibody. In some instances, the VHH antibody comprises variation in one or more CDR regions. In some instances, the VHH libraries described herein comprise at least or about 100, 200, 300, 400, 500, 600, 700, 800, 900, 1000, 1200, 1400, 1600, 1800, 2000, 2400, 2600, 2800, 3000, or more than 3000 sequences of a CDR1, CDR2, or CDR3. For example, the libraries comprise at least 2000 sequences of a CDR1, at least 1200 sequences for CDR2, and at least 1600 sequences for CDR3. In some instances, each sequence is non-identical.

[0044] Libraries as described herein may comprise varying lengths of a CDRH1, CDRH2, CDRH3, CDRL1, CDRL2, CDRL3, or combinations thereof of amino acids when translated. In some instances, the length of the CDRH1, CDRH2, CDRH3, CDRL1, CDRL2, CDRL3, or combinations thereof of amino acids when translated is at least or about 5, 6, 7, 8, 9, 10, 11, 12, 13, 14, 15, 16, 17, 18, 19, 20, 21, 22, 23, 24, 25, 26, 27, 28, 29, 30, or more than 30 amino acids.

[0045] Libraries comprising nucleic acids encoding for antibodies having variant CDR sequences as described herein comprise various lengths of amino acids when translated. In some instances, the length of each of the amino acid fragments or average length of the amino acid synthesized may be at least or about 15, 20, 25, 30, 35, 40, 45, 50, 55, 60, 65, 70, 75, 80, 85, 90, 95, 100, 105, 110, 115, 120, 125, 130, 135, 140, 145, 150, or more than 150 amino acids. In some instances, the length of the amino acid is about 15 to 150, 20 to 145, 25 to 140, 30 to 135, 35 to 130, 40 to 125, 45 to 120, 50 to 115, 55 to 110, 60 to 110, 65 to 105, 70 to 100, or 75 to 95 amino acids. In some instances, the length of the amino acid is about 22 amino acids to about 75 amino acids. In some instances, the antibodies comprise at least or about 100, 200, 300, 400, 500, 600, 700, 800, 900, 1000, 2000, 3000, 4000, 5000, or more than 5000 amino acids. In some instances, the library is a VHH library. In some instances, the library is an antibody library.

[0046] Libraries as described herein encoding for a VHH antibody comprise variant CDR sequences that are shuffled to generate a library with a theoretical diversity of at least or about 10⁷, 10⁸, 10⁹, 10¹⁰, 10¹¹, 10¹², 10¹³, 10¹⁴, 10¹⁵, 10¹⁶, 10¹⁷, 10¹⁸, or more than 10¹⁸ sequences. In some instances, the library has a final library diversity of at least or about 10⁷, 10⁸, 10⁹, 10¹⁰, 10¹¹, 10¹², 10¹³, 10¹⁴, 10¹⁵, 10¹⁶, 10¹⁷, 10¹⁸, or more than 10¹⁸ sequences.

[0047] Libraries as described herein encoding for an antibody or immunoglobulin comprise variant CDR sequences that are shuffled to generate a library with a theoretical diversity of at least or about 10⁷, 10⁸, 10⁹, 10¹⁰, 10¹¹, 10¹², 10¹³, 10¹⁴, 10¹⁵, 10¹⁶, 10¹⁷, 10¹⁸, or more than 10¹⁸ sequences. In some instances, the library has a final library diversity of at least or about 10⁷, 10⁸, 10⁹, 10¹⁰, 10¹¹, 10¹², 10¹³, 10¹⁴, 10¹⁵, 10¹⁶, 10¹⁷, 10¹⁸, or more than 10¹⁸ sequences.

[0048] Methods described herein provide for synthesis of libraries comprising nucleic acids encoding an antibody or immunoglobulin, wherein each nucleic acid encodes for a predetermined variant of at least one predetermined reference nucleic acid sequence. In some cases, the predetermined reference sequence is a nucleic acid sequence encoding for a protein, and the variant library comprises sequences encoding for variation of at least a single codon such that a plurality of different variants of a single residue in the subsequent protein encoded by the synthesized nucleic acid are generated by standard translation processes. In some instances, the antibody library comprises varied nucleic acids collectively encoding variations at multiple positions. In some instances, the variant library comprises sequences encoding for variation of at least a single codon of a CDRH1, CDRH2, CDRH3, CDRL1, CDRL2, CDRL3, VL, or VH domain. In some instances, the variant library comprises sequences encoding for variation of multiple codons of a CDRH1, CDRH2, CDRH3, CDRL1, CDRL2, CDRL3, VL, or VH domain. In some instances, the variant library comprises sequences encoding for variation of multiple codons of framework element 1 (FW1), framework element 2 (FW2), framework element 3 (FW3), or framework element 4 (FW4). An exemplary number of codons for variation include, but are not limited to, at least or about 1, 5, 10, 15, 20, 25, 30, 35, 40, 45, 50, 55, 60, 65, 70, 75, 80, 85, 90, 95, 100, 125, 150, 175, 225, 250, 275, 300, or more than 300 codons.

[0049] In some instances, the at least one region of the antibody for variation is from heavy chain V-gene family, heavy chain D-gene family, heavy chain J-gene family, light chain V-gene family, or light chain J-gene family. In some instances, the light chain V-gene family comprises immunoglobulin kappa (IGK) gene or immunoglobulin lambda (IGL). Exemplary regions of the antibody for variation include, but are not limited to, IGHV1-18, IGHV1-69, IGHV1-8, IGHV3-21, IGHV3-23, IGHV3-30/33rn, IGHV3-28, IGHV1-69, IGHV3-74, IGHV4-39, IGHV4-59/61, IGKV1-39, IGKV1-9, IGKV2-28, IGKV3-11, IGKV3-15, IGKV3-20, IGKV4-1, IGLV1-51, IGLV2-14, IGLV1-40, and IGLV3-1. In some instances, the gene is IGHV1-69, IGHV3-30, IGHV3-23, IGHV3, IGHV1-46, IGHV3-7, IGHV1, or IGHV1-8. In some instances, the gene is IGHV1-69 and IGHV3-30. In some instances, the region of the antibody for variation is IGHJ3, IGHJ6, IGHJ, IGHJ4, IGHJ5, IGHJ2, or IGH1. In some instances, the region of the antibody for variation is IGHJ3, IGHJ6, IGHJ, or IGHJ4. In some instances, the at least one region of the antibody for variation is IGHV1-69, IGHV3-23, IGKV3-20, IGKV1-39 or combinations thereof. In some instances, the at least one region of the antibody for variation is IGHV1-69 or IGHV3-23. In some instances, the at least one region of the antibody for variation is IGKV3-20 or IGKV1-39. In some instances, the at least one region of the antibody for variation is IGHV1-69 and IGKV3-20, In some instances, the at least one region of the antibody for variation is IGHV1-69 and IGKV1-39. In some instances, the at least one region of the antibody for variation is IGHV3-23 and IGKV3-20. In some instances, the at least one region of the antibody for variation is IGHV3-23 and IGKV1-39.

[0050] Provided herein are libraries comprising nucleic acids encoding for antibodies, wherein the libraries are synthesized with various numbers of fragments. In some instances, the fragments comprise the CDRH1, CDRH2, CDRH3, CDRL1, CDRL2, CDRL3, VL, or VH domain. In some instances, the fragments comprise framework element 1 (FW1), framework element 2 (FW2), framework element 3 (FW3), or framework element 4 (FW4). In some instances, the antibody libraries are synthesized with at least or about 2 fragments, 3 fragments, 4 fragments, 5 fragments, or more than 5 fragments. The length of each of the nucleic acid fragments or average length of the nucleic acids synthesized may be at least or about 50, 75, 100, 125, 150, 175, 200, 225, 250, 275, 300, 325, 350, 375, 400, 425, 450, 475, 500, 525, 550, 575, 600, or more than 600 base pairs. In some instances, the length is about 50 to 600, 75 to 575, 100 to 550, 125 to 525, 150 to 500, 175 to 475, 200 to 450, 225 to 425, 250 to 400, 275 to 375, or 300 to 350 base pairs.

[0051] Libraries comprising nucleic acids encoding for antibodies or immunoglobulins as described herein comprise various lengths of amino acids when translated. In some instances, the length of each of the amino acid fragments or average length of the amino acid synthesized may be at least or about 15, 20, 25, 30, 35, 40, 45, 50, 55, 60, 65, 70, 75, 80, 85, 90, 95, 100, 105, 110, 115, 120, 125, 130, 135, 140, 145, 150, or more than 150 amino acids. In some instances, the length of the amino acid is about 15 to 150, 20 to 145, 25 to 140, 30 to 135, 35 to 130, 40 to 125, 45 to 120, 50 to 115, 55 to 110, 60 to 110, 65 to 105, 70 to 100, or 75 to 95 amino acids. In some instances, the length of the amino acid is about 22 amino acids to about 75 amino acids. In some instances, the antibodies comprise at least or about 100, 200, 300, 400, 500, 600, 700, 800, 900, 1000, 2000, 3000, 4000, 5000, or more than 5000 amino acids.

[0052] A number of variant sequences for the at least one region of the antibody for variation are de novo synthesized using methods as described herein. In some instances, a number of variant sequences is de novo synthesized for CDRH1, CDRH2, CDRH3, CDRL1, CDRL2, CDRL3, VL, VH, or combinations thereof. In some instances, a number of variant sequences is de novo synthesized for framework element 1 (FW1), framework element 2 (FW2), framework element 3 (FW3), or framework element 4 (FW4). The number of variant sequences may be at least or about 5, 10, 15, 20, 25, 30, 35, 40, 45, 50, 55, 60, 65, 70, 75, 80, 85, 90, 95, 100, 125, 150, 175, 200, 225, 250, 275, 300, 325, 350, 375, 400, 425, 450, 475, 500, or more than 500 sequences. In some instances, the number of variant sequences is at least or about 500, 600, 700, 800, 900, 1000, 2000, 3000, 4000, 5000, 6000, 7000, 8000, or more than 8000 sequences. In some instances, the number of variant sequences is about 10 to 500, 25 to 475, 50 to 450, 75 to 425, 100 to 400, 125 to 375, 150 to 350, 175 to 325, 200 to 300, 225 to 375, 250 to 350, or 275 to 325 sequences.

[0053] Variant sequences for the at least one region of the antibody, in some instances, vary in length or sequence. In some instances, the at least one region that is de novo synthesized is for CDRH1, CDRH2, CDRH3, CDRL1, CDRL2, CDRL3, VL, VH, or combinations thereof In some instances, the at least one region that is de novo synthesized is for framework element 1 (FW1), framework element 2 (FW2), framework element 3 (FW3), or framework element 4 (FW4). In some instances, the variant sequence comprises at least or about 1, 2, 3, 4, 5, 6, 7, 8, 9, 10, 15, 20, 25, 30, 35, 40, 45, 50, or more than 50 variant nucleotides or amino acids as compared to wild-type. In some instances, the variant sequence comprises at least or about 1, 2, 3, 4, 5, 6, 7, 8, 9, 10, 15, 20, 25, 30, 35, 40, 45, or 50 additional nucleotides or amino acids as compared to wild-type. In some instances, the variant sequence comprises at least or about 1, 2, 3, 4, 5, 6, 7, 8, 9, 10, 15, 20, 25, 30, 35, 40, 45, or 50 less nucleotides or amino acids as compared to wild-type. In some instances, the libraries comprise at least or about 10¹, 10², 10³, 10⁴, 10⁵, 10⁶, 10⁷, 10⁸, 10⁹, 10¹⁰, or more than 10¹⁰ variants.

[0054] Following synthesis of antibody libraries, antibody libraries may be used for screening and analysis. For example, antibody libraries are assayed for library displayability and panning. In some instances, displayability is assayed using a selectable tag. Exemplary tags include, but are not limited to, a radioactive label, a fluorescent label, an enzyme, a chemiluminescent tag, a colorimetric tag, an affinity tag or other labels or tags that are known in the art. In some instances, the tag is histidine, polyhistidine, myc, hemagglutinin (HA), or FLAG. For example, as seen in FIG. 2B. In some instances, antibody libraries are assayed by sequencing using various methods including, but not limited to, single-molecule real-time (SMRT) sequencing, Polony sequencing, sequencing by ligation, reversible terminator sequencing, proton detection sequencing, ion semiconductor sequencing, nanopore sequencing, electronic sequencing, pyrosequencing, Maxam-Gilbert sequencing, chain termination (e.g., Sanger) sequencing, +S sequencing, or sequencing by synthesis. In some instances, antibody libraries are displayed on the surface of a cell or phage. In some instances, antibody libraries are enriched for sequences with a desired activity using phage display.

[0055] In some instances, the antibody libraries are assayed for functional activity, structural stability (e.g., thermal stable or pH stable), expression, specificity, or a combination thereof. In some instances, the antibody libraries are assayed for antibody capable of folding. In some instances, a region of the antibody is assayed for functional activity, structural stability, expression, specificity, folding, or a combination thereof. For example, a VH region or VL region is assayed for functional activity, structural stability, expression, specificity, folding, or a combination thereof

[0056] Antibodies or IgGs generated by methods as described herein comprise improved binding affinity. In some instances, the antibody comprises a binding affinity (e.g., K_{D} ) of less than 1 nM, less than 1.2 nM, less than 2 nM, less than 5 nM, less than 10 nM, less than 11 nm, less than 13.5 nM, less than 15 nM, less than 20 nM, less than 25 nM, or less than 30 nM. In some instances, the antibody comprises a K_{D} of less than 400 nM, less than 350 nM, less than 300 nM, less than 250 nM, less than 200 nM, less than 150 nm, less than 100 nM, less than 50 nM, less than 25 nM, less than 15 nM, or less than 10 nM. In some instances, the antibody comprises a K_{D} of less than 1 nM. In some instances, the antibody comprises a K_{D} of less than 1.2 nM. In some instances, the antibody comprises a K_{D} of less than 2 nM. In some instances, the antibody comprises a K_{D} of less than 5 nM. In some instances, the antibody comprises a K_{D} of less than 10 nM. In some instances, the antibody comprises a K_{D} of less than 13.5 nM. In some instances, the antibody comprises a K_{D} of less than 15 nM. In some instances, the antibody comprises a K_{D} of less than 20 nM. In some instances, the antibody comprises a K_{D} of less than 25 nM. In some instances, the antibody comprises a K_{D} of less than 30 nM.

[0057] In some instances, the affinity of antibodies or IgGs generated by methods as described herein is at least or about 1.5×, 2.0×, 5×, 10×, 20×, 30×, 40×, 50×, 60×, 70×, 80×, 90×, 100×, 200×, or more than 200× improved binding affinity as compared to a comparator antibody. In some instances, the affinity of antibodies or IgGs generated by methods as described herein is at least or about 1.5×, 2.0×, 5×, 10×, 20×, 30×, 40×, 50×, 60×, 70×, 80×, 90×, 100×, 200×, or more than 200× improved function as compared to a comparator antibody. In some instances, the comparator antibody is an antibody with similar structure, sequence, or antigen target.

[0058] Methods as described herein, in some instances, result in increased yield of antibodies or IgGs. In some instances, the yield is at least or about 5, 10, 15, 20, 25, 30, 35, 40, 45, 50, 55, 60, 65, 70, 75, 80, or more than 80 micrograms (ug). In some instances, the yield is in a range of about 5 to about 80, about 10 to about 75, about 15 to about 60, about 20 to about 50, or about 30 to about 40 micrograms (ug).

[0059] Expression Systems

[0060] Provided herein are libraries comprising nucleic acids encoding for antibody comprising binding domains, wherein the libraries have improved specificity, stability, expression, folding, or downstream activity. In some instances, libraries described herein are used for screening and analysis.

[0061] Provided herein are libraries comprising nucleic acids encoding for antibody comprising binding domains, wherein the nucleic acid libraries are used for screening and analysis. In some instances, screening and analysis comprises in vitro, in vivo, or ex vivo assays. Cells for screening include primary cells taken from living subjects or cell lines. Cells may be from prokaryotes (e.g., bacteria and fungi) or eukaryotes (e.g., animals and plants). Exemplary animal cells include, without limitation, those from a mouse, rabbit, primate, and insect. In some instances, cells for screening include a cell line including, but not limited to, Chinese Hamster Ovary (CHO) cell line, human embryonic kidney (HEK) cell line, or baby hamster kidney (BHK) cell line. In some instances, nucleic acid libraries described herein may also be delivered to a multicellular organism. Exemplary multicellular organisms include, without limitation, a plant, a mouse, rabbit, primate, and insect.

[0062] Nucleic acid libraries described herein may be screened for various pharmacological or pharmacokinetic properties. In some instances, the libraries are screened using in vitro assays, in vivo assays, or ex vivo assays. For example, in vitro pharmacological or pharmacokinetic properties that are screened include, but are not limited to, binding affinity, binding specificity, and binding avidity. Exemplary in vivo pharmacological or pharmacokinetic properties of libraries described herein that are screened include, but are not limited to, therapeutic efficacy, activity, preclinical toxicity properties, clinical efficacy properties, clinical toxicity properties, immunogenicity, potency, and clinical safety properties.

[0063] Provided herein are nucleic acid libraries, wherein the nucleic acid libraries may be expressed in a vector. Expression vectors for inserting nucleic acid libraries disclosed herein may comprise eukaryotic or prokaryotic expression vectors. Exemplary expression vectors include, without limitation, mammalian expression vectors: pSF-CMV-NEO-NH2-PPT-3XFLAG, pSF-CMV-NEO-COOH-3XFLAG, pSF-CMV-PURO-NH2-GST-TEV, pSF-OXB20-COOH-TEV-FLAG(R)-6His (“6His” disclosed as SEQ ID NO: 2243), pCEP4 pDEST27, pSF-CMV-Ub-KrYFP, pSF-CMV-FMDV-daGFP, pEF1a-mCherry-N1 Vector, pEF1a-tdTomato Vector, pSF-CMV-FMDV-Hygro, pSF-CMV-PGK-Puro, pMCP-tag(m), and pSF-CMV-PURO-NH2-CMYC; bacterial expression vectors: pSF-OXB20-BetaGal, pSF-OXB20-Fluc, pSF-OXB20, and pSF-Tac; plant expression vectors: pRI 101-AN DNA and pCambia2301; and yeast expression vectors: pTYB21 and pKLAC2, and insect vectors: pAc5.1/V5-His A and pDEST8. In some instances, the vector is pcDNA3 or pcDNA3.1.

[0064] Described herein are nucleic acid libraries that are expressed in a vector to generate a construct comprising an antibody. In some instances, a size of the construct varies. In some instances, the construct comprises at least or about 500, 600, 700, 800, 900, 1000, 1100, 1300, 1400, 1500, 1600, 1700, 1800, 2000, 2400, 2600, 2800, 3000, 3200, 3400, 3600, 3800, 4000, 4200, 4400, 4600, 4800, 5000, 6000, 7000, 8000, 9000, 10000, or more than 10000 bases. In some instances, a the construct comprises a range of about 300 to 1,000, 300 to 2,000, 300 to 3,000, 300 to 4,000, 300 to 5,000, 300 to 6,000, 300 to 7,000, 300 to 8,000, 300 to 9,000, 300 to 10,000, 1,000 to 2,000, 1,000 to 3,000, 1,000 to 4,000, 1,000 to 5,000, 1,000 to 6,000, 1,000 to 7,000, 1,000 to 8,000, 1,000 to 9,000, 1,000 to 10,000, 2,000 to 3,000, 2,000 to 4,000, 2,000 to 5,000, 2,000 to 6,000, 2,000 to 7,000, 2,000 to 8,000, 2,000 to 9,000, 2,000 to 10,000, 3,000 to 4,000, 3,000 to 5,000, 3,000 to 6,000, 3,000 to 7,000, 3,000 to 8,000, 3,000 to 9,000, 3,000 to 10,000, 4,000 to 5,000, 4,000 to 6,000, 4,000 to 7,000, 4,000 to 8,000, 4,000 to 9,000, 4,000 to 10,000, 5,000 to 6,000, 5,000 to 7,000, 5,000 to 8,000, 5,000 to 9,000, 5,000 to 10,000, 6,000 to 7,000, 6,000 to 8,000, 6,000 to 9,000, 6,000 to 10,000, 7,000 to 8,000, 7,000 to 9,000, 7,000 to 10,000, 8,000 to 9,000, 8,000 to 10,000, or 9,000 to 10,000 bases.

[0065] Provided herein are libraries comprising nucleic acids encoding for antibodies, wherein the nucleic acid libraries are expressed in a cell. In some instances, the libraries are synthesized to express a reporter gene. Exemplary reporter genes include, but are not limited to, acetohydroxyacid synthase (AHAS), alkaline phosphatase (AP), beta galactosidase (LacZ), beta glucoronidase (GUS), chloramphenicol acetyltransferase (CAT), green fluorescent protein (GFP), red fluorescent protein (RFP), yellow fluorescent protein (YFP), cyan fluorescent protein (CFP), cerulean fluorescent protein, citrine fluorescent protein, orange fluorescent protein , cherry fluorescent protein, turquoise fluorescent protein, blue fluorescent protein, horseradish peroxidase (HRP), luciferase (Luc), nopaline synthase (NOS), octopine synthase (OCS), luciferase, and derivatives thereof. Methods to determine modulation of a reporter gene are well known in the art, and include, but are not limited to, fluorometric methods (e.g. fluorescence spectroscopy, Fluorescence Activated Cell Sorting (FACS), fluorescence microscopy), and antibiotic resistance determination.

### Diseases and Disorders

[0066] Provided herein are libraries comprising nucleic acids encoding for antibodies or immunoglobulins including VHH antibodies that may have therapeutic effects. In some instances, the antibodies or immunoglobulin result in protein when translated that is used to treat a disease or disorder in a subject. Exemplary diseases include, but are not limited to, cancer, inflammatory diseases or disorders, a metabolic disease or disorder, a cardiovascular disease or disorder, a respiratory disease or disorder, pain, a digestive disease or disorder, a reproductive disease or disorder, an endocrine disease or disorder, or a neurological disease or disorder. In some instances, the cancer is a solid cancer or a hematologic cancer. In some instances, the subject is a mammal. In some instances, the subject is a mouse, rabbit, dog, or human. Subjects treated by methods described herein may be infants, adults, or children. Pharmaceutical compositions comprising antibodies or antibody fragments as described herein may be administered intravenously or subcutaneously.

[0067] In some instances, the disease or disorder is associated with TIGIT dysfunction. In some instances, the disease or disorder is associated with aberrant signaling via TIGIT.

[0068] Provided herein are libraries comprising nucleic acids encoding for antibodies or immunoglobulins that may be designed for various protein targets. In some instances, the protein is an ion channel, G protein-coupled receptor, tyrosine kinase receptor, an immune receptor, a membrane protein, or combinations thereof. In some instances, the protein is a receptor. In some instances, the protein is T cell immunoreceptor with Ig and ITIM domains (TIGIT).

[0069] Described herein, in some embodiments, are antibodies or immunoglobulins that bind to the TIGIT. In some instances, the TIGIT antibody or immunoglobulin sequence comprises a sequence comprising at least or about 70%, 80%, 85%, 90%, 91%, 92%, 93%, 94%, 95%, 96%, 97%, 98%, 99%, or 100% sequence identity to any one of SEQ ID NOs: 1-2238. In some instances, the TIGIT antibody or immunoglobulin sequence comprises a sequence comprising at least or about 95% sequence identity to any one of SEQ ID NOs: 1-2238. In some instances, the TIGIT antibody or immunoglobulin sequence comprises a sequence comprising at least or about 97% sequence identity to any one of SEQ ID NOs: 1-2238. In some instances, the TIGIT antibody or immunoglobulin sequence comprises a sequence comprising at least or about 99% sequence identity to any one of SEQ ID NOs: 1-2238. In some instances, the TIGIT antibody or immunoglobulin sequence comprises a sequence comprising at least or about 100% sequence identity to any one of SEQ ID NOs: 1-2238. In some instances, the TIGIT antibody or immunoglobulin sequence comprises a sequence comprising at least a portion having at least or about 1, 2, 3, 4, 5, 6, 7, 8, 9, 10, 12, 14, 16, 18, 20, or more than 20 amino acids of any one of SEQ ID NOs: 1-17. In some instances, the TIGIT antibody or immunoglobulin sequence comprises a sequence comprising at least a portion having at least or about 1, 2, 3, 4, 5, 6, 7, 8, 9, 10, 12, 14, 16, 18, 20, 30, 40, 50, 60, 70, 80, 90, 100, 110, 120, 130, 140, 150, or more than 150 amino acids of any one of SEQ ID NOs: 18-61.

[0070] In some instances, the TIGIT antibody or immunoglobulin sequence comprises a sequence comprising at least or about 70%, 80%, 85%, 90%, 91%, 92%, 93%, 94%, 95%, 96%, 97%, 98%, 99%, or 100% sequence identity to any one of SEQ ID NOs: 35-44 or 62-2238. In some instances, the TIGIT antibody or immunoglobulin sequence comprises a sequence comprising at least or about 95% sequence identity to any one of SEQ ID NOs: 35-44 or 62-2238. In some instances, the TIGIT antibody or immunoglobulin sequence comprises a sequence comprising at least or about 97% sequence identity to any one of SEQ ID NOs: 35-44 or 62-2238. In some instances, the TIGIT antibody or immunoglobulin sequence comprises a sequence comprising at least or about 99% sequence identity to any one of SEQ ID NOs: 35-44 or 62-2238. In some instances, the TIGIT antibody or immunoglobulin sequence comprises a sequence comprising at least or about 100% sequence identity to any one of SEQ ID NOs: 35-44 or 62-2238. In some instances, the TIGIT antibody or immunoglobulin sequence comprises a sequence comprising at least a portion having at least or about 1, 2, 3, 4, 5, 6, 7, 8, 9, 10, 12, 14, 16, 18, 20, 30, 40, 50, 60, 70, 80, 90, 100, 110, 120, 130, 140, 150, or more than 150 amino acids of any one of SEQ ID NOs: 35-44 or 62-2238.

[0071] In some instances, the TIGIT antibody or immunoglobulin sequence comprises a variable domain of heavy chain comprising at least or about 70%, 80%, 85%, 90%, 91%, 92%, 93%, 94%, 95%, 96%, 97%, 98%, 99%, or 100% sequence identity to any one of SEQ ID NOs: 18-44, 1367-1548, or 2141-2189. In some instances, the TIGIT antibody or immunoglobulin sequence comprises a variable domain of heavy chain comprising at least or about 95% sequence identity to any one of SEQ ID NOs: 18-44, 1367-1548, or 2141-2189. In some instances, the TIGIT antibody or immunoglobulin sequence comprises a variable domain of heavy chain comprising at least or about 97% sequence identity to any one of SEQ ID NOs: 18-44, 1367-1548, or 2141-2189. In some instances, the TIGIT antibody or immunoglobulin sequence comprises a variable domain of heavy chain comprising at least or about 99% sequence identity to any one of SEQ ID NOs: 18-44, 1367-1548, or 2141-2189. In some instances, the TIGIT antibody or immunoglobulin sequence comprises a variable domain of heavy chain comprising at least or about 100% sequence identity to any one of SEQ ID NOs: 18-44, 1367-1548, or 2141-2189. In some instances, the TIGIT antibody or immunoglobulin sequence comprises a variable domain of heavy chain comprising at least a portion having at least or about 1, 2, 3, 4, 5, 6, 7, 8, 9, 10, 12, 14, 16, 18, 20, 30, 40, 50, 60, 70, 80, 90, 100, 110, 120, 130, 140, 150, or more than 150 amino acids of any one of SEQ ID NOs: 18-44, 1367-1548, or 2141-2189.

[0072] In some instances, the TIGIT antibody or immunoglobulin sequence comprises a variable domain of heavy chain comprising at least or about 70%, 80%, 85%, 90%, 91%, 92%, 93%, 94%, 95%, 96%, 97%, 98%, 99%, or 100% sequence identity to any one of SEQ ID NOs: 35-44, 1367-1548, or 2141-2189. In some instances, the TIGIT antibody or immunoglobulin sequence comprises a variable domain of heavy chain comprising at least or about 95% sequence identity to any one of SEQ ID NOs: 35-44, 1367-1548, or 2141-2189. In some instances, the TIGIT antibody or immunoglobulin sequence comprises a variable domain of heavy chain comprising at least or about 97% sequence identity to any one of SEQ ID NOs: 35-44, 1367-1548, or 2141-2189. In some instances, the TIGIT antibody or immunoglobulin sequence comprises a variable domain of heavy chain comprising at least or about 99% sequence identity to any one of SEQ ID NOs: 35-44, 1367-1548, or 2141-2189. In some instances, the TIGIT antibody or immunoglobulin sequence comprises a variable domain of heavy chain comprising at least or about 100% sequence identity to any one of SEQ ID NOs: 35-44, 1367-1548, or 2141-2189. In some instances, the TIGIT antibody or immunoglobulin sequence comprises a variable domain of heavy chain comprising at least a portion having at least or about 1, 2, 3, 4, 5, 6, 7, 8, 9, 10, 12, 14, 16, 18, 20, 30, 40, 50, 60, 70, 80, 90, 100, 110, 120, 130, 140, 150, or more than 150 amino acids of any one of SEQ ID NOs: 35-44, 1367-1548, or 2141-2189.

[0073] In some instances, the TIGIT antibody or immunoglobulin sequence comprises a variable domain of light chain comprising at least or about 70%, 80%, 85%, 90%, 91%, 92%, 93%, 94%, 95%, 96%, 97%, 98%, 99%, or 100% sequence identity to any one of SEQ ID NOs: 45-61, 1549-1685, or 2190-2238. In some instances, the TIGIT antibody or immunoglobulin sequence comprises a variable domain of light chain comprising at least or about 95% sequence identity to any one of SEQ ID NOs: 45-61, 1549-1685, or 2190-2238. In some instances, the TIGIT antibody or immunoglobulin sequence comprises a variable domain of light chain comprising at least or about 97% sequence identity to any one of SEQ ID NOs: 45-61,1549-1685, or 2190-2238. In some instances, the TIGIT antibody or immunoglobulin sequence comprises a variable domain of light chain comprising at least or about 99% sequence identity to any one of SEQ ID NOs: 45-61, 1549-1685, or 2190-2238. In some instances, the TIGIT antibody or immunoglobulin sequence comprises a variable domain of light chain comprising at least or about 100% sequence identity to any one of SEQ ID NOs: 45-61, 1549-1685, or 2190-2238. In some instances, the TIGIT antibody or immunoglobulin sequence comprises a variable domain of light chain comprising at least a portion having at least or about 1, 2, 3, 4, 5, 6, 7, 8, 9, 10, 12, 14, 16, 18, 20, 30, 40, 50, 60, 70, 80, 90, 100, 110, 120, or more than 120 amino acids of any one of SEQ ID NOs: 45-61, 1549-1685, or 2190-2238.

[0074] In some instances, the TIGIT antibody or immunoglobulin sequence comprises a variable domain of heavy chain comprising at least or about 70%, 80%, 85%, 90%, 91%, 92%, 93%, 94%, 95%, 96%, 97%, 98%, 99%, or 100% sequence identity to any one of SEQ ID NOs: 35-44, 1367-1548, or 2141-2189 and a variable domain of light chain comprising at least or about 70%, 80%, 85%, 90%, 91%, 92%, 93%, 94%, 95%, 96%, 97%, 98%, 99%, or 100% sequence identity to any one of SEQ ID NOs: 45-61, 1549-1685, or 2190-2238. In some instances, the TIGIT antibody or immunoglobulin sequence comprises a variable domain of heavy chain comprising at least or about 95% sequence identity to any one of SEQ ID NOs: 35-44, 1367-1548, or 2141-2189 and a variable domain of light chain comprising at least or about 95% sequence identity to any one of SEQ ID NOs: 45-61, 1549-1685, or 2190-2238. In some instances, the TIGIT antibody or immunoglobulin sequence comprises a variable domain of heavy chain comprising at least or about 97% sequence identity to any one of SEQ ID NOs: 35-44, 1367-1548, or 2141-2189 and a variable domain of light chain comprising at least or about 97% sequence identity to any one of SEQ ID NOs: 45-61, 1549-1685, or 2190-2238. In some instances, the TIGIT antibody or immunoglobulin sequence comprises a variable domain of heavy chain comprising at least or about 99% sequence identity to any one of SEQ ID NOs: 35-44, 1367-1548, or 2141-2189 and a variable domain of light chain comprising at least or about 99% sequence identity to any one of SEQ ID NOs: 45-61, 1549-1685, or 2190-2238. In some instances, the TIGIT antibody or immunoglobulin sequence comprises a variable domain of heavy chain comprising at least or about 100% sequence identity to any one of SEQ ID NOs: 35-44, 1367-1548, or 2141-2189 and a variable domain of light chain comprising at least or about 100% sequence identity to any one of SEQ ID NOs: 45-61,1549-1685, or 2190-2238. In some instances, the TIGIT antibody or immunoglobulin sequence comprises a variable domain of heavy chain comprising at least a portion having at least or about 1, 2, 3, 4, 5, 6, 7, 8, 9, 10, 12, 14, 16, 18, 20, 30, 40, 50, 60, 70, 80, 90, 100, 110, 120, 130, 140, 150, or more than 150 amino acids of any one of SEQ ID NOs: 35-44, 1367-1548, or 2141-2189 and a variable domain of light chain comprising at least a portion having at least or about 1, 2, 3, 4, 5, 6, 7, 8, 9, 10, 12, 14, 16, 18, 20, 30, 40, 50, 60, 70, 80, 90, 100, 110, 120, or more than 120 amino acids of any one of SEQ ID NOs: 45-61, 1549-1685, or 2190-2238.

[0075] In some embodiments, the TIGIT antibody or immunoglobulin sequence comprises complementarity determining regions (CDRs) comprising at least or about 70%, 80%, 85%, 90%, 91%, 92%, 93%, 94%, 95%, 96%, 97%, 98%, 99%, or 100% sequence identity to any one of SEQ ID NOs: 62-1366 or 1847-2140. In some instances, the antibody or immunoglobulin sequence comprises complementarity determining regions (CDRs) comprising at least or about 95% homology to any one of SEQ ID NOs: 62-1366 or 1847-2140. In some instances, the antibody or immunoglobulin sequence comprises complementarity determining regions (CDRs) comprising at least or about 97% homology to any one of SEQ ID NOs: 62-1366 or 1847-2140. In some instances, the antibody or immunoglobulin sequence comprises complementarity determining regions (CDRs) comprising at least or about 99% homology to any one of SEQ ID NOs: 62-1366 or 1847-2140. In some instances, the antibody or immunoglobulin sequence comprises complementarity determining regions (CDRs) comprising at least or about 100% homology to any one of SEQ ID NOs: 62-1366 or 1847-2140. In some instances, the antibody or immunoglobulin sequence comprises complementarity determining regions (CDRs) comprising at least a portion having at least or about 3, 4, 5, 6, 7, 8, 9, 10, 12, 14, 16, or more than 16 amino acids of any one of SEQ ID NOs: 62-1366 or 1847-2140.

[0076] In some embodiments, the TIGIT antibody or immunoglobulin sequence comprises a CDR1 comprising at least or about 70%, 80%, 85%, 90%, 91%, 92%, 93%, 94%, 95%, 96%, 97%, 98%, 99%, or 100% sequence identity to any one of SEQ ID NOs:62-359, 956-1092, 1847-1895, or 1994-2042. In some instances, the antibody or immunoglobulin sequence comprises CDR1 comprising at least or about 95% homology of any one of SEQ ID NOs: 62-359, 956-1092, 1847-1895, or 1994-2042. In some instances, the antibody or immunoglobulin sequence comprises CDR1 comprising at least or about 97% homology to any one of SEQ ID NOs: 62-359, 956-1092, 1847-1895, or 1994-2042. In some instances, the antibody or immunoglobulin sequence comprises CDR1 comprising at least or about 99% homology to any one of SEQ ID NOs: 62-359, 956-1092, 1847-1895, or 1994-2042. In some instances, the antibody or immunoglobulin sequence comprises CDR1 comprising at least or about 100% homology to any one of SEQ ID NOs: 62-359, 956-1092, 1847-1895, or 1994-2042. In some instances, the antibody or immunoglobulin sequence comprises CDR1 comprising at least a portion having at least or about 3, 4, 5, 6, 7, 8, 9, 10, 12, 14, 16, or more than 16 amino acids of any one of SEQ ID NOs: 62-359, 956-1092, 1847-1895, or 1994-2042.

[0077] In some embodiments, the TIGIT antibody or immunoglobulin sequence comprises a CDR2 comprising at least or about 70%, 80%, 85%, 90%, 91%, 92%, 93%, 94%, 95%, 96%, 97%, 98%, 99%, or 100% sequence identity to any one of SEQ ID NOs: 360-657, 1093-1229, 1896-1944, or 2043-2091. In some instances, the antibody or immunoglobulin sequence comprises CDR2 comprising at least or about 95% homology to any one of SEQ ID NOs: 360-657, 1093-1229, 1896-1944, or 2043-2091. In some instances, the antibody or immunoglobulin sequence comprises CDR2 comprising at least or about 97% homology to any one of SEQ ID NOs: 360-657, 1093-1229, 1896-1944, or 2043-2091. In some instances, the antibody or immunoglobulin sequence comprises CDR2 comprising at least or about 99% homology to any one of SEQ ID NOs: 360-657, 1093-1229, 1896-1944, or 2043-2091. In some instances, the antibody or immunoglobulin sequence comprises CDR2 comprising at least or about 100% homology to any one of SEQ ID NOs: 360-657, 1093-1229, 1896-1944, or 2043-2091. In some instances, the antibody or immunoglobulin sequence comprises CDR2 comprising at least a portion having at least or about 3, 4, 5, 6, 7, 8, 9, 10, 12, 14, 16, or more than 16 amino acids of any one of SEQ ID NOs: 360-657, 1093-1229, 1896-1944, or 2043-2091.

[0078] In some embodiments, the TIGIT antibody or immunoglobulin sequence comprises a CDR3 comprising at least or about 70%, 80%, 85%, 90%, 91%, 92%, 93%, 94%, 95%, 96%, 97%, 98%, 99%, or 100% sequence identity to any one of SEQ ID NOs: 658-955, 1230-1366, 1945-1993, or 2092-2140. In some instances, the antibody or immunoglobulin sequence comprises CDR3 comprising at least or about 95% homology to any one of SEQ ID NOs: 658-955, 1230-1366, 1945-1993, or 2092-2140. In some instances, the antibody or immunoglobulin sequence comprises CDR3 comprising at least or about 97% homology to any one of SEQ ID NOs: 658-955, 1230-1366, 1945-1993, or 2092-2140. In some instances, the antibody or immunoglobulin sequence comprises CDR3 comprising at least or about 99% homology to any one of SEQ ID NOs: 658-955, 1230-1366, 1945-1993, or 2092-2140. In some instances, the antibody or immunoglobulin sequence comprises CDR3 comprising at least or about 100% homology to any one of SEQ ID NOs: 658-955, 1230-1366, 1945-1993, or 2092-2140. In some instances, the antibody or immunoglobulin sequence comprises CDR3 comprising at least a portion having at least or about 3, 4, 5, 6, 7, 8, 9, 10, 12, 14, 16, or more than 16 amino acids of any one of SEQ ID NOs: 658-955, 1230-1366, 1945-1993, or 2092-2140.

[0079] In some embodiments, the TIGIT antibody or immunoglobulin sequence comprises a CDRH1 comprising at least or about 70%, 80%, 85%, 90%, 91%, 92%, 93%, 94%, 95%, 96%, 97%, 98%, 99%, or 100% sequence identity to any one of SEQ ID NOs: 62-359 or 1847-1895. In some instances, the antibody or immunoglobulin sequence comprises CDRH1 comprising at least or about 95% homology of any one of SEQ ID NOs: 62-359 or 1847-1895. In some instances, the antibody or immunoglobulin sequence comprises CDRH1 comprising at least or about 97% homology to any one of SEQ ID NOs: 62-359 or 1847-1895. In some instances, the antibody or immunoglobulin sequence comprises CDRH1 comprising at least or about 99% homology to any one of SEQ ID NOs: 62-359 or 1847-1895. In some instances, the antibody or immunoglobulin sequence comprises CDRH1 comprising at least or about 100% homology to any one of SEQ ID NOs: 62-359 or 1847-1895. In some instances, the antibody or immunoglobulin sequence comprises CDRH1 comprising at least a portion having at least or about 3, 4, 5, 6, 7, 8, 9, 10, 12, 14, 16, or more than 16 amino acids of any one of SEQ ID NOs: 62-359 or 1847-1895.

[0080] In some embodiments, the TIGIT antibody or immunoglobulin sequence comprises a CDRH2 comprising at least or about 70%, 80%, 85%, 90%, 91%, 92%, 93%, 94%, 95%, 96%, 97%, 98%, 99%, or 100% sequence identity to any one of SEQ ID NOs: 360-657 or 1896-1944. In some instances, the antibody or immunoglobulin sequence comprises CDRH2 comprising at least or about 95% homology to any one of SEQ ID NOs: 360-657 or 1896-1944. In some instances, the antibody or immunoglobulin sequence comprises CDRH2 comprising at least or about 97% homology to any one of SEQ ID NOs: 360-657 or 1896-1944. In some instances, the antibody or immunoglobulin sequence comprises CDRH2 comprising at least or about 99% homology to any one of SEQ ID NOs: 360-657 or 1896-1944. In some instances, the antibody or immunoglobulin sequence comprises CDRH2 comprising at least or about 100% homology to any one of SEQ ID NOs: 360-657 or 1896-1944. In some instances, the antibody or immunoglobulin sequence comprises CDRH2 comprising at least a portion having at least or about 3, 4, 5, 6, 7, 8, 9, 10, 12, 14, 16, or more than 16 amino acids of any one of SEQ ID NOs: 360-657 or 1896-1944.

[0081] In some embodiments, the TIGIT antibody or immunoglobulin sequence comprises a CDRH3 comprising at least or about 70%, 80%, 85%, 90%, 91%, 92%, 93%, 94%, 95%, 96%, 97%, 98%, 99%, or 100% sequence identity to any one of SEQ ID NOs: 658-955 or 1945-1993. In some instances, the antibody or immunoglobulin sequence comprises CDRH3 comprising at least or about 95% homology to any one of SEQ ID NOs: 658-955 or 1945-1993. In some instances, the antibody or immunoglobulin sequence comprises CDRH3 comprising at least or about 97% homology to any one of SEQ ID NOs: 658-955 or 1945-1993. In some instances, the antibody or immunoglobulin sequence comprises CDRH3 comprising at least or about 99% homology to any one of SEQ ID NOs: 658-955 or 1945-1993. In some instances, the antibody or immunoglobulin sequence comprises CDRH3 comprising at least or about 100% homology to any one of SEQ ID NOs: 658-955 or 1945-1993. In some instances, the antibody or immunoglobulin sequence comprises CDRH3 comprising at least a portion having at least or about 3, 4, 5, 6, 7, 8, 9, 10, 12, 14, 16, or more than 16 amino acids of any one of SEQ ID NOs: 658-955 or 1945-1993.

[0082] In some embodiments, the TIGIT antibody or immunoglobulin sequence comprises a CDRL1 comprising at least or about 70%, 80%, 85%, 90%, 91%, 92%, 93%, 94%, 95%, 96%, 97%, 98%, 99%, or 100% sequence identity to any one of SEQ ID NOs: 956-1092 or 1994-2042. In some instances, the antibody or immunoglobulin sequence comprises CDRL1 comprising at least or about 95% homology of any one of SEQ ID NOs: 956-1092 or 1994-2042. In some instances, the antibody or immunoglobulin sequence comprises CDRL1 comprising at least or about 97% homology to any one of SEQ ID NOs: 956-1092 or 1994-2042. In some instances, the antibody or immunoglobulin sequence comprises CDRL1 comprising at least or about 99% homology to any one of SEQ ID NOs: 956-1092 or 1994-2042. In some instances, the antibody or immunoglobulin sequence comprises CDRL1 comprising at least or about 100% homology to any one of SEQ ID NOs956-1092 or 1994-2042. In some instances, the antibody or immunoglobulin sequence comprises CDRL1 comprising at least a portion having at least or about 3, 4, 5, 6, 7, 8, 9, 10, 12, 14, 16, or more than 16 amino acids of any one of SEQ ID NOs: 956-1092 or 1994-2042.

[0083] In some embodiments, the TIGIT antibody or immunoglobulin sequence comprises a CDRL2 comprising at least or about 70%, 80%, 85%, 90%, 91%, 92%, 93%, 94%, 95%, 96%, 97%, 98%, 99%, or 100% sequence identity to any one of SEQ ID NOs: 1093-1229 or 2043-2091. In some instances, the antibody or immunoglobulin sequence comprises CDRL2 comprising at least or about 95% homology to any one of SEQ ID NOs: 1093-12291093-1229 or 2043-2091. In some instances, the antibody or immunoglobulin sequence comprises CDRL2 comprising at least or about 97% homology to any one of SEQ ID NOs: 1093-12291093-1229 or 2043-2091. In some instances, the antibody or immunoglobulin sequence comprises CDRL2 comprising at least or about 99% homology to any one of SEQ ID NOs: 1093-12291093-1229 or 2043-2091. In some instances, the antibody or immunoglobulin sequence comprises CDRL2 comprising at least or about 100% homology to any one of SEQ ID NOs: 1093-12291093-1229 or 2043-2091. In some instances, the antibody or immunoglobulin sequence comprises CDRL2 comprising at least a portion having at least or about 3, 4, 5, 6, 7, 8, 9, 10, 12, 14, 16, or more than 16 amino acids of any one of SEQ ID NOs: 1093-12291093-1229 or 2043-2091.

[0084] In some embodiments, the TIGIT antibody or immunoglobulin sequence comprises a CDRL3 comprising at least or about 70%, 80%, 85%, 90%, 91%, 92%, 93%, 94%, 95%, 96%, 97%, 98%, 99%, or 100% sequence identity to any one of SEQ ID NOs: 1230-1366 or 2092-2140. In some instances, the antibody or immunoglobulin sequence comprises CDRL3 comprising at least or about 95% homology to any one of SEQ ID NOs: 1230-1366 or 2092-2140. In some instances, the antibody or immunoglobulin sequence comprises CDRL3 comprising at least or about 97% homology to any one of SEQ ID NOs: 1230-1366 or 2092-2140. In some instances, the antibody or immunoglobulin sequence comprises CDRL3 comprising at least or about 99% homology to any one of SEQ ID NOs: 1230-1366 or 2092-2140. In some instances, the antibody or immunoglobulin sequence comprises CDRL3 comprising at least or about 100% homology to any one of SEQ ID NOs: 1230-1366 or 2092-2140. In some instances, the antibody or immunoglobulin sequence comprises CDRL3 comprising at least a portion having at least or about 3, 4, 5, 6, 7, 8, 9, 10, 12, 14, 16, or more than 16 amino acids of any one of SEQ ID NOs: 1230-1366 or 2092-2140.

[0085] In some embodiments, the TIGIT antibody or immunoglobulin sequence comprises a CDRH1 comprising at least or about 70%, 80%, 85%, 90%, 91%, 92%, 93%, 94%, 95%, 96%, 97%, 98%, 99%, or 100% sequence identity to any one of SEQ ID NOs: 62-359 or 1847-1895 and a CDRL1 comprising at least or about 70%, 80%, 85%, 90%, 91%, 92%, 93%, 94%, 95%, 96%, 97%, 98%, 99%, or 100% sequence identity to any one of SEQ ID NOs: 956-1092 or 1994-2042. In some instances, the antibody or immunoglobulin sequence comprises CDRH1 comprising at least or about 95% homology of any one of SEQ ID NOs: 62-359 or 1847-1895 and a CDRL1 comprising at least or about 95% homology of any one of SEQ ID NOs: 956-1092 or 1994-2042. In some instances, the antibody or immunoglobulin sequence comprises CDRH1 comprising at least or about 97% homology to any one of SEQ ID NOs: 62-359 or 1847-1895 and a CDRL1 comprising at least or about 97% homology to any one of SEQ ID NOs: 956-1092 or 1994-2042. In some instances, the antibody or immunoglobulin sequence comprises CDRH1 comprising at least or about 99% homology to any one of SEQ ID NOs: 62-359 or 1847-1895 and a CDRL1 comprising at least or about 99% homology to any one of SEQ ID NOs: 956-1092 or 1994-2042. In some instances, the antibody or immunoglobulin sequence comprises CDRH1 comprising at least or about 100% homology to any one of SEQ ID NOs: 62-359 or 1847-1895 and a CDRL1 comprising at least or about 100% homology to any one of SEQ ID NOs: 956-1092 or 1994-2042. In some instances, the antibody or immunoglobulin sequence comprises CDRH1 comprising at least a portion having at least or about 3, 4, 5, 6, 7, 8, 9, 10, 12, 14, 16, or more than 16 amino acids of any one of SEQ ID NOs: 62-359 or 1847-1895 and a CDRL1 comprising at least a portion having at least or about 3, 4, 5, 6, 7, 8, 9, 10, 12, 14, 16, or more than 16 amino acids of any one of SEQ ID NOs: 956-1092 or 1994-2042.

[0086] In some embodiments, the TIGIT antibody or immunoglobulin sequence comprises a CDRH2 comprising at least or about 70%, 80%, 85%, 90%, 91%, 92%, 93%, 94%, 95%, 96%, 97%, 98%, 99%, or 100% sequence identity to any one of SEQ ID NOs: 360-657 or 1896-1944 and a CDRL2 comprising at least or about 70%, 80%, 85%, 90%, 91%, 92%, 93%, 94%, 95%, 96%, 97%, 98%, 99%, or 100% sequence identity to any one of SEQ ID NOs: 1093-1229 or 2043-2091. In some instances, the antibody or immunoglobulin sequence comprises CDRH2 comprising at least or about 95% homology to any one of SEQ ID NOs: 360-657 or 1896-1944 and a CDRL2 comprising at least or about 95% homology to any one of SEQ ID NOs: 1093-1229 or 2043-2091. In some instances, the antibody or immunoglobulin sequence comprises CDRH2 comprising at least or about 97% homology to any one of SEQ ID NOs: 360-657 or 1896-1944 and a CDRL2 comprising at least or about 97% homology to any one of SEQ ID NOs: 1093-1229 or 2043-2091. In some instances, the antibody or immunoglobulin sequence comprises CDRH2 comprising at least or about 99% homology to any one of SEQ ID NOs: 360-657 or 1896-1944 and a CDRL2 comprising at least or about 99% homology to any one of SEQ ID NOs: 1093-1229 or 2043-2091. In some instances, the antibody or immunoglobulin sequence comprises CDRH2 comprising at least or about 100% homology to any one of SEQ ID NOs: 360-657 or 1896-1944 and a CDRL2 comprising at least or about 100% homology to any one of SEQ ID NOs: 1093-1229 or 2043-2091. In some instances, the antibody or immunoglobulin sequence comprises CDRH2 comprising at least a portion having at least or about 3, 4, 5, 6, 7, 8, 9, 10, 12, 14, 16, or more than 16 amino acids of any one of SEQ ID NOs: 360-657 or 1896-1944 and a CDRL2 comprising at least a portion having at least or about 3, 4, 5, 6, 7, 8, 9, 10, 12, 14, 16, or more than 16 amino acids of any one of SEQ ID NOs: 1093-1229 or 2043-2091.

[0087] In some embodiments, the TIGIT antibody or immunoglobulin sequence comprises a CDRH3 comprising at least or about 70%, 80%, 85%, 90%, 91%, 92%, 93%, 94%, 95%, 96%, 97%, 98%, 99%, or 100% sequence identity to any one of SEQ ID NOs: 658-955 or 1945-1993 and a CDRL3 comprising at least or about 70%, 80%, 85%, 90%, 91%, 92%, 93%, 94%, 95%, 96%, 97%, 98%, 99%, or 100% sequence identity to any one of SEQ ID NOs: 1230-1366 or 2092-2140. In some instances, the antibody or immunoglobulin sequence comprises CDRH3 comprising at least or about 95% homology to any one of SEQ ID NOs: 658-955 or 1945-1993 and a CDRL3 comprising at least or about 95% homology to any one of SEQ ID NOs: 1230-1366 or 2092-2140. In some instances, the antibody or immunoglobulin sequence comprises CDRH3 comprising at least or about 97% homology to any one of SEQ ID NOs: 658-955 or 1945-1993 and a CDRL3 comprising at least or about 97% homology to any one of SEQ ID NOs: 1230-1366 or 2092-2140. In some instances, the antibody or immunoglobulin sequence comprises CDRH3 comprising at least or about 99% homology to any one of SEQ ID NOs: 658-955 or 1945-1993 and a CDRL3 comprising at least or about 99% homology to any one of SEQ ID NOs: 1230-1366 or 2092-2140. In some instances, the antibody or immunoglobulin sequence comprises CDRH3 comprising at least or about 100% homology to any one of SEQ ID NOs: 658-955 or 1945-1993 and a CDRL3 comprising at least or about 100% homology to any one of SEQ ID NOs: 1230-1366 or 2092-2140. In some instances, the antibody or immunoglobulin sequence comprises CDRH3 comprising at least a portion having at least or about 3, 4, 5, 6, 7, 8, 9, 10, 12, 14, 16, or more than 16 amino acids of any one of SEQ ID NOs: 658-955 or 1945-1993 and a CDRL3 comprising at least a portion having at least or about 3, 4, 5, 6, 7, 8, 9, 10, 12, 14, 16, or more than 16 amino acids of any one of SEQ ID NOs: 1230-1366 or 2092-2140.

### Variant Libraries

[0088] Codon Variation

[0089] Variant nucleic acid libraries described herein may comprise a plurality of nucleic acids, wherein each nucleic acid encodes for a variant codon sequence compared to a reference nucleic acid sequence. In some instances, each nucleic acid of a first nucleic acid population contains a variant at a single variant site. In some instances, the first nucleic acid population contains a plurality of variants at a single variant site such that the first nucleic acid population contains more than one variant at the same variant site. The first nucleic acid population may comprise nucleic acids collectively encoding multiple codon variants at the same variant site. The first nucleic acid population may comprise nucleic acids collectively encoding up to 19 or more codons at the same position. The first nucleic acid population may comprise nucleic acids collectively encoding up to 60 variant triplets at the same position, or the first nucleic acid population may comprise nucleic acids collectively encoding up to 61 different triplets of codons at the same position. Each variant may encode for a codon that results in a different amino acid during translation. Table 1 provides a listing of each codon possible (and the representative amino acid) for a variant site.

TABLE 1
List of codons and amino acids

| | One | Three | | | | | | |
|---|---|---|---|---|---|---|---|---|
| | letter | letter | | | | | | |
| Amino Acids | code | code | Codons | | | | | |
| Alanine | A | Ala | GCA | GCC | GCG | GCT | | |
| Cysteine | C | Cys | TGC | TGT | | | | |
| Aspartic acid | D | Asp | GAC | GAT | | | | |
| Glutamic acid | E | Glu | GAA | GAG | | | | |
| Phenylalanine | F | Phe | TTC | TTT | | | | |
| Glycine | G | Gly | GGA | GGC | GGG | GGT | | |
| Histidine | H | His | CAC | CAT | | | | |
| Isoleucine | I | Iso | ATA | ATC | ATT | | | |
| Lysine | K | Lys | AAA | AAG | | | | |
| Leucine | L | Leu | TTA | TTG | CTA | CTC | CTG | CTT |
| Methionine | M | Met | ATG | | | | | |
| Asparagine | N | Asn | AAC | AAT | | | | |
| Proline | P | Pro | CCA | CCC | CCG | CCT | | |
| Glutamine | Q | Gln | CAA | CAG | | | | |
| Arginine | R | Arg | AGA | AGG | CGA | CGC | CGG | CGT |
| Serine | S | Ser | AGC | AGT | TCA | TCC | TCG | TCT |

| | | | | | | |
|---|---|---|---|---|---|---|
| Threonine | T | Thr | ACA | ACC | ACG | ACT |
| Valine | V | Val | GTA | GTC | GTG | GTT |

| Tryptophan | W | Trp | TGG | |
|---|---|---|---|---|
| Tyrosine | Y | Tyr | TAC | TAT |

[0090] A nucleic acid population may comprise varied nucleic acids collectively encoding up to 20 codon variations at multiple positions. In such cases, each nucleic acid in the population comprises variation for codons at more than one position in the same nucleic acid. In some instances, each nucleic acid in the population comprises variation for codons at 1, 2, 3, 4, 5, 6, 7, 8, 9, 10, 11, 12, 13, 14, 15, 16, 17, 18, 19, 20 or more codons in a single nucleic acid. In some instances, each variant long nucleic acid comprises variation for codons at 1, 2, 3, 4, 5, 6, 7, 8, 9, 10, 11, 12, 13, 14, 15, 16, 17, 18, 19, 20, 21, 22, 23, 24, 25, 26, 27, 28, 29, 30 or more codons in a single long nucleic acid. In some instances, the variant nucleic acid population comprises variation for codons at 1, 2, 3, 4, 5, 6, 7, 8, 9, 10, 11, 12, 13, 14, 15, 16, 17, 18, 19, 20, 21, 22, 23, 24, 25, 26, 27, 28, 29, 30 or more codons in a single nucleic acid. In some instances, the variant nucleic acid population comprises variation for codons in at least about 10, 20, 30, 40, 50, 60, 70, 80, 90, 100 or more codons in a single long nucleic acid.

### Highly Parallel Nucleic Acid Synthesis

[0091] Provided herein is a platform approach utilizing miniaturization, parallelization, and vertical integration of the end-to-end process from polynucleotide synthesis to gene assembly within nanowells on silicon to create a revolutionary synthesis platform. Devices described herein provide, with the same footprint as a 96-well plate, a silicon synthesis platform is capable of increasing throughput by a factor of up to 1,000 or more compared to traditional synthesis methods, with production of up to approximately 1,000,000 or more polynucleotides, or 10,000 or more genes in a single highly-parallelized run.

[0092] With the advent of next-generation sequencing, high resolution genomic data has become an important factor for studies that delve into the biological roles of various genes in both normal biology and disease pathogenesis. At the core of this research is the central dogma of molecular biology and the concept of “residue-by-residue transfer of sequential information.” Genomic information encoded in the DNA is transcribed into a message that is then translated into the protein that is the active product within a given biological pathway.

[0093] Another exciting area of study is on the discovery, development and manufacturing of therapeutic molecules focused on a highly-specific cellular target. High diversity DNA sequence libraries are at the core of development pipelines for targeted therapeutics. Gene mutants are used to express proteins in a design, build, and test protein engineering cycle that ideally culminates in an optimized gene for high expression of a protein with high affinity for its therapeutic target. As an example, consider the binding pocket of a receptor. The ability to test all sequence permutations of all residues within the binding pocket simultaneously will allow for a thorough exploration, increasing chances of success. Saturation mutagenesis, in which a researcher attempts to generate all possible mutations at a specific site within the receptor, represents one approach to this development challenge. Though costly and time and labor-intensive, it enables each variant to be introduced into each position. In contrast, combinatorial mutagenesis, where a few selected positions or short stretch of DNA may be modified extensively, generates an incomplete repertoire of variants with biased representation.

[0094] To accelerate the drug development pipeline, a library with the desired variants available at the intended frequency in the right position available for testing—in other words, a precision library, enables reduced costs as well as turnaround time for screening. Provided herein are methods for synthesizing nucleic acid synthetic variant libraries which provide for precise introduction of each intended variant at the desired frequency. To the end user, this translates to the ability to not only thoroughly sample sequence space but also be able to query these hypotheses in an efficient manner, reducing cost and screening time. Genome-wide editing can elucidate important pathways, libraries where each variant and sequence permutation can be tested for optimal functionality, and thousands of genes can be used to reconstruct entire pathways and genomes to re-engineer biological systems for drug discovery.

[0095] In a first example, a drug itself can be optimized using methods described herein. For example, to improve a specified function of an antibody, a variant polynucleotide library encoding for a portion of the antibody is designed and synthesized. A variant nucleic acid library for the antibody can then be generated by processes described herein (e.g., PCR mutagenesis followed by insertion into a vector). The antibody is then expressed in a production cell line and screened for enhanced activity. Example screens include examining modulation in binding affinity to an antigen, stability, or effector function (e.g., ADCC, complement, or apoptosis). Exemplary regions to optimize the antibody include, without limitation, the Fc region, Fab region, variable region of the Fab region, constant region of the Fab region, variable domain of the heavy chain or light chain (V_{H} or V_{L}), and specific complementarity-determining regions (CDRs) of V_{H} or V_{L}.

[0096] Nucleic acid libraries synthesized by methods described herein may be expressed in various cells associated with a disease state. Cells associated with a disease state include cell lines, tissue samples, primary cells from a subject, cultured cells expanded from a subject, or cells in a model system. Exemplary model systems include, without limitation, plant and animal models of a disease state.

[0097] To identify a variant molecule associated with prevention, reduction or treatment of a disease state, a variant nucleic acid library described herein is expressed in a cell associated with a disease state, or one in which a cell a disease state can be induced. In some instances, an agent is used to induce a disease state in cells. Exemplary tools for disease state induction include, without limitation, a Cre/Lox recombination system, LPS inflammation induction, and streptozotocin to induce hypoglycemia. The cells associated with a disease state may be cells from a model system or cultured cells, as well as cells from a subject having a particular disease condition. Exemplary disease conditions include a bacterial, fungal, viral, autoimmune, or proliferative disorder (e.g., cancer). In some instances, the variant nucleic acid library is expressed in the model system, cell line, or primary cells derived from a subject, and screened for changes in at least one cellular activity. Exemplary cellular activities include, without limitation, proliferation, cycle progression, cell death, adhesion, migration, reproduction, cell signaling, energy production, oxygen utilization, metabolic activity, and aging, response to free radical damage, or any combination thereof

### Substrates

[0098] Devices used as a surface for polynucleotide synthesis may be in the form of substrates which include, without limitation, homogenous array surfaces, patterned array surfaces, channels, beads, gels, and the like. Provided herein are substrates comprising a plurality of clusters, wherein each cluster comprises a plurality of loci that support the attachment and synthesis of polynucleotides. In some instances, substrates comprise a homogenous array surface. For example, the homogenous array surface is a homogenous plate. The term “locus” as used herein refers to a discrete region on a structure which provides support for polynucleotides encoding for a single predetermined sequence to extend from the surface. In some instances, a locus is on a two dimensional surface, e.g., a substantially planar surface. In some instances, a locus is on a three-dimensional surface, e.g., a well, microwell, channel, or post. In some instances, a surface of a locus comprises a material that is actively functionalized to attach to at least one nucleotide for polynucleotide synthesis, or preferably, a population of identical nucleotides for synthesis of a population of polynucleotides. In some instances, polynucleotide refers to a population of polynucleotides encoding for the same nucleic acid sequence. In some cases, a surface of a substrate is inclusive of one or a plurality of surfaces of a substrate. The average error rates for polynucleotides synthesized within a library described here using the systems and methods provided are often less than 1 in 1000, less than about 1 in 2000, less than about 1 in 3000 or less often without error correction.

[0099] Provided herein are surfaces that support the parallel synthesis of a plurality of polynucleotides having different predetermined sequences at addressable locations on a common support. In some instances, a substrate provides support for the synthesis of more than 50, 100, 200, 400, 600, 800, 1000, 1200, 1400, 1600, 1800, 2,000; 5,000; 10,000; 20,000; 50,000; 100,000; 200,000; 300,000; 400,000; 500,000; 600,000; 700,000; 800,000; 900,000; 1,000,000; 1,200,000; 1,400,000; 1,600,000; 1,800,000; 2,000,000; 2,500,000; 3,000,000; 3,500,000; 4,000,000; 4,500,000; 5,000,000; 10,000,000 or more non-identical polynucleotides. In some cases, the surfaces provide support for the synthesis of more than 50, 100, 200, 400, 600, 800, 1000, 1200, 1400, 1600, 1800, 2,000; 5,000; 10,000; 20,000; 50,000; 100,000; 200,000; 300,000; 400,000; 500,000; 600,000; 700,000; 800,000; 900,000; 1,000,000; 1,200,000; 1,400,000; 1,600,000; 1,800,000; 2,000,000; 2,500,000; 3,000,000; 3,500,000; 4,000,000; 4,500,000; 5,000,000; 10,000,000 or more polynucleotides encoding for distinct sequences. In some instances, at least a portion of the polynucleotides have an identical sequence or are configured to be synthesized with an identical sequence. In some instances, the substrate provides a surface environment for the growth of polynucleotides having at least 80, 90, 100, 120, 150, 175, 200, 225, 250, 275, 300, 325, 350, 375, 400, 425, 450, 475, 500 bases or more.

[0100] Provided herein are methods for polynucleotide synthesis on distinct loci of a substrate, wherein each locus supports the synthesis of a population of polynucleotides. In some cases, each locus supports the synthesis of a population of polynucleotides having a different sequence than a population of polynucleotides grown on another locus. In some instances, each polynucleotide sequence is synthesized with 1, 2, 3, 4, 5, 6, 7, 8, 9 or more redundancy across different loci within the same cluster of loci on a surface for polynucleotide synthesis. In some instances, the loci of a substrate are located within a plurality of clusters. In some instances, a substrate comprises at least 10, 500, 1000, 2000, 3000, 4000, 5000, 6000, 7000, 8000, 9000, 10000, 11000, 12000, 13000, 14000, 15000, 20000, 30000, 40000, 50000 or more clusters. In some instances, a substrate comprises more than 2,000; 5,000; 10,000; 100,000; 200,000; 300,000; 400,000; 500,000; 600,000; 700,000; 800,000; 900,000; 1,000,000; 1,100,000; 1,200,000; 1,300,000; 1,400,000; 1,500,000; 1,600,000; 1,700,000; 1,800,000; 1,900,000; 2,000,000; 300,000; 400,000; 500,000; 600,000; 700,000; 800,000; 900,000; 1,000,000; 1,200,000; 1,400,000; 1,600,000; 1,800,000; 2,000,000; 2,500,000; 3,000,000; 3,500,000; 4,000,000; 4,500,000; 5,000,000; or 10,000,000 or more distinct loci. In some instances, a substrate comprises about 10,000 distinct loci. The amount of loci within a single cluster is varied in different instances. In some cases, each cluster includes 1, 2, 3, 4, 5, 6, 7, 8, 9, 10, 20, 30, 40, 50, 60, 70, 80, 90, 100, 120, 130, 150, 200, 300, 400, 500 or more loci. In some instances, each cluster includes about 50-500 loci. In some instances, each cluster includes about 100-200 loci. In some instances, each cluster includes about 100-150 loci. In some instances, each cluster includes about 109, 121, 130 or 137 loci. In some instances, each cluster includes about 19, 20, 61, 64 or more loci. Alternatively or in combination, polynucleotide synthesis occurs on a homogenous array surface.

[0101] In some instances, the number of distinct polynucleotides synthesized on a substrate is dependent on the number of distinct loci available in the substrate. In some instances, the density of loci within a cluster or surface of a substrate is at least or about 1, 10, 25, 50, 65, 75, 100, 130, 150, 175, 200, 300, 400, 500, 1,000 or more loci per mm². In some cases, a substrate comprises 10-500, 25-400, 50-500, 100-500, 150-500, 10-250, 50-250, 10-200, or 50-200 mm². In some instances, the distance between the centers of two adjacent loci within a cluster or surface is from about 10-500, from about 10-200, or from about 10-100 um. In some instances, the distance between two centers of adjacent loci is greater than about 10, 20, 30, 40, 50, 60, 70, 80, 90 or 100 um. In some instances, the distance between the centers of two adjacent loci is less than about 200, 150, 100, 80, 70, 60, 50, 40, 30, 20 or 10 um. In some instances, each locus has a width of about 0.5, 1, 2, 3, 4, 5, 6, 7, 8, 9, 10, 20, 30, 40, 50, 60, 70, 80, 90 or 100 um. In some cases, each locus has a width of about 0.5-100, 0.5-50, 10-75, or 0.5-50 um.

[0102] In some instances, the density of clusters within a substrate is at least or about 1 cluster per 100 mm², 1 cluster per 10 mm², 1 cluster per 5 mm², 1 cluster per 4 mm², 1 cluster per 3 mm², 1 cluster per 2 mm², 1 cluster per 1 mm², 2 clusters per 1 mm², 3 clusters per 1 mm², 4 clusters per 1 mm², 5 clusters per 1 mm², 10 clusters per 1 mm², 50 clusters per 1 mm² or more. In some instances, a substrate comprises from about 1 cluster per 10 mm² to about 10 clusters per 1 mm². In some instances, the distance between the centers of two adjacent clusters is at least or about 50, 100, 200, 500, 1000, 2000, or 5000 um. In some cases, the distance between the centers of two adjacent clusters is between about 50-100, 50-200, 50-300, 50-500, and 100-2000 um. In some cases, the distance between the centers of two adjacent clusters is between about 0.05-50, 0.05-10, 0.05-5, 0.05-4, 0.05-3, 0.05-2, 0.1-10, 0.2-10, 0.3-10, 0.4-10, 0.5-10, 0.5-5, or 0.5-2 mm. In some cases, each cluster has a cross section of about 0.5 to about 2, about 0.5 to about 1, or about 1 to about 2 mm. In some cases, each cluster has a cross section of about 0.5, 0.6, 0.7, 0.8, 0.9, 1, 1.1, 1.2, 1.3, 1.4, 1.5, 1.6, 1.7, 1.8, 1.9 or 2 mm. In some cases, each cluster has an interior cross section of about 0.5, 0.6, 0.7, 0.8, 0.9, 1, 1.1, 1.15, 1.2, 1.3, 1.4, 1.5, 1.6, 1.7, 1.8, 1.9 or 2 mm.

[0103] In some instances, a substrate is about the size of a standard 96 well plate, for example between about 100 and about 200 mm by between about 50 and about 150 mm. In some instances, a substrate has a diameter less than or equal to about 1000, 500, 450, 400, 300, 250, 200, 150, 100 or 50 mm. In some instances, the diameter of a substrate is between about 25-1000, 25-800, 25-600, 25-500, 25-400, 25-300, or 25-200 mm. In some instances, a substrate has a planar surface area of at least about 100; 200; 500; 1,000; 2,000; 5,000; 10,000; 12,000; 15,000; 20,000; 30,000; 40,000; 50,000 mm² or more. In some instances, the thickness of a substrate is between about 50-2000, 50- 1000, 100-1000, 200-1000, or 250-1000 mm.

[0104] Surface Materials

[0105] Substrates, devices, and reactors provided herein are fabricated from any variety of materials suitable for the methods, compositions, and systems described herein. In certain instances, substrate materials are fabricated to exhibit a low level of nucleotide binding. In some instances, substrate materials are modified to generate distinct surfaces that exhibit a high level of nucleotide binding. In some instances, substrate materials are transparent to visible and/or UV light. In some instances, substrate materials are sufficiently conductive, e.g., are able to form uniform electric fields across all or a portion of a substrate. In some instances, conductive materials are connected to an electric ground. In some instances, the substrate is heat conductive or insulated. In some instances, the materials are chemical resistant and heat resistant to support chemical or biochemical reactions, for example polynucleotide synthesis reaction processes. In some instances, a substrate comprises flexible materials. For flexible materials, materials can include, without limitation: nylon, both modified and unmodified, nitrocellulose, polypropylene, and the like. In some instances, a substrate comprises rigid materials. For rigid materials, materials can include, without limitation: glass; fuse silica; silicon, plastics (for example polytetraflouroethylene, polypropylene, polystyrene, polycarbonate, and blends thereof, and the like); metals (for example, gold, platinum, and the like). The substrate, solid support or reactors can be fabricated from a material selected from the group consisting of silicon, polystyrene, agarose, dextran, cellulosic polymers, polyacrylamides, polydimethylsiloxane (PDMS), and glass. The substrates/solid supports or the microstructures, reactors therein may be manufactured with a combination of materials listed herein or any other suitable material known in the art.

### Surface Architecture

[0106] Provided herein are substrates for the methods, compositions, and systems described herein, wherein the substrates have a surface architecture suitable for the methods, compositions, and systems described herein. In some instances, a substrate comprises raised and/or lowered features. One benefit of having such features is an increase in surface area to support polynucleotide synthesis. In some instances, a substrate having raised and/or lowered features is referred to as a three-dimensional substrate. In some cases, a three-dimensional substrate comprises one or more channels. In some cases, one or more loci comprise a channel. In some cases, the channels are accessible to reagent deposition via a deposition device such as a material deposition device. In some cases, reagents and/or fluids collect in a larger well in fluid communication one or more channels. For example, a substrate comprises a plurality of channels corresponding to a plurality of loci with a cluster, and the plurality of channels are in fluid communication with one well of the cluster. In some methods, a library of polynucleotides is synthesized in a plurality of loci of a cluster.

[0107] Provided herein are substrates for the methods, compositions, and systems described herein, wherein the substrates are configured for polynucleotide synthesis. In some instances, the structure is configured to allow for controlled flow and mass transfer paths for polynucleotide synthesis on a surface. In some instances, the configuration of a substrate allows for the controlled and even distribution of mass transfer paths, chemical exposure times, and/or wash efficacy during polynucleotide synthesis. In some instances, the configuration of a substrate allows for increased sweep efficiency, for example by providing sufficient volume for a growing polynucleotide such that the excluded volume by the growing polynucleotide does not take up more than 50, 45, 40, 35,30, 25, 20, 15, 14, 13, 12, 11, 10, 9, 8, 7, 6, 5, 4, 3, 2, 1%, or less of the initially available volume that is available or suitable for growing the polynucleotide. In some instances, a three-dimensional structure allows for managed flow of fluid to allow for the rapid exchange of chemical exposure.

[0108] Provided herein are substrates for the methods, compositions, and systems described herein, wherein the substrates comprise structures suitable for the methods, compositions, and systems described herein. In some instances, segregation is achieved by physical structure. In some instances, segregation is achieved by differential functionalization of the surface generating active and passive regions for polynucleotide synthesis. In some instances, differential functionalization is achieved by alternating the hydrophobicity across the substrate surface, thereby creating water contact angle effects that cause beading or wetting of the deposited reagents. Employing larger structures can decrease splashing and cross-contamination of distinct polynucleotide synthesis locations with reagents of the neighboring spots. In some cases, a device, such as a material deposition device, is used to deposit reagents to distinct polynucleotide synthesis locations. Substrates having three-dimensional features are configured in a manner that allows for the synthesis of a large number of polynucleotides (e.g., more than about 10,000) with a low error rate (e.g., less than about 1:500, 1:1000, 1:1500, 1:2,000, 1:3,000, 1:5,000, or 1:10,000). In some cases, a substrate comprises features with a density of about or greater than about 1, 5, 10, 20, 30, 40, 50, 60, 70, 80, 100, 110, 120, 130, 140, 150, 160, 170, 180, 190, 200, 300, 400 or 500 features per mm².

[0109] A well of a substrate may have the same or different width, height, and/or volume as another well of the substrate. A channel of a substrate may have the same or different width, height, and/or volume as another channel of the substrate. In some instances, the diameter of a cluster or the diameter of a well comprising a cluster, or both, is between about 0.05-50, 0.05-10, 0.05-5, 0.05-4, 0.05-3, 0.05-2, 0.05-1, 0.05-0.5, 0.05-0.1, 0.1-10, 0.2-10, 0.3-10, 0.4-10, 0.5-10, 0.5-5, or 0.5-2 mm. In some instances, the diameter of a cluster or well or both is less than or about 5, 4, 3, 2, 1, 0.5, 0.1, 0.09, 0.08, 0.07, 0.06, or 0.05 mm. In some instances, the diameter of a cluster or well or both is between about 1.0 and 1.3 mm. In some instances, the diameter of a cluster or well, or both is about 1.150 mm. In some instances, the diameter of a cluster or well, or both is about 0.08 mm. The diameter of a cluster refers to clusters within a two-dimensional or three-dimensional substrate.

[0110] In some instances, the height of a well is from about 20-1000, 50-1000, 100- 1000, 200-1000, 300-1000, 400-1000, or 500-1000 um. In some cases, the height of a well is less than about 1000, 900, 800, 700, or 600 um.

[0111] In some instances, a substrate comprises a plurality of channels corresponding to a plurality of loci within a cluster, wherein the height or depth of a channel is 5-500, 5-400, 5-300, 5-200, 5-100, 5-50, or 10-50 um. In some cases, the height of a channel is less than 100, 80, 60, 40, or 20 um.

[0112] In some instances, the diameter of a channel, locus (e.g., in a substantially planar substrate) or both channel and locus (e.g., in a three-dimensional substrate wherein a locus corresponds to a channel) is from about 1-1000, 1-500, 1-200, 1-100, 5-100, or 10-100 um, for example, about 90, 80, 70, 60, 50, 40, 30, 20 or 10 um. In some instances, the diameter of a channel, locus, or both channel and locus is less than about 100, 90, 80, 70, 60, 50, 40, 30, 20 or 10 um. In some instances, the distance between the center of two adjacent channels, loci, or channels and loci is from about 1-500, 1-200, 1-100, 5-200, 5-100, 5-50, or 5-30, for example, about 20 um.

### Surface Modifications

[0113] Provided herein are methods for polynucleotide synthesis on a surface, wherein the surface comprises various surface modifications. In some instances, the surface modifications are employed for the chemical and/or physical alteration of a surface by an additive or subtractive process to change one or more chemical and/or physical properties of a substrate surface or a selected site or region of a substrate surface. For example, surface modifications include, without limitation, (1) changing the wetting properties of a surface, (2) functionalizing a surface, i.e., providing, modifying or substituting surface functional groups, (3) defunctionalizing a surface, i.e., removing surface functional groups, (4) otherwise altering the chemical composition of a surface, e.g., through etching, (5) increasing or decreasing surface roughness, (6) providing a coating on a surface, e.g., a coating that exhibits wetting properties that are different from the wetting properties of the surface, and/or (7) depositing particulates on a surface.

[0114] In some cases, the addition of a chemical layer on top of a surface (referred to as adhesion promoter) facilitates structured patterning of loci on a surface of a substrate. Exemplary surfaces for application of adhesion promotion include, without limitation, glass, silicon, silicon dioxide and silicon nitride. In some cases, the adhesion promoter is a chemical with a high surface energy. In some instances, a second chemical layer is deposited on a surface of a substrate. In some cases, the second chemical layer has a low surface energy. In some cases, surface energy of a chemical layer coated on a surface supports localization of droplets on the surface. Depending on the patterning arrangement selected, the proximity of loci and/or area of fluid contact at the loci are alterable.

[0115] In some instances, a substrate surface, or resolved loci, onto which nucleic acids or other moieties are deposited, e.g., for polynucleotide synthesis, are smooth or substantially planar (e.g., two-dimensional) or have irregularities, such as raised or lowered features (e.g., three-dimensional features). In some instances, a substrate surface is modified with one or more different layers of compounds. Such modification layers of interest include, without limitation, inorganic and organic layers such as metals, metal oxides, polymers, small organic molecules and the like.

[0116] In some instances, resolved loci of a substrate are functionalized with one or more moieties that increase and/or decrease surface energy. In some cases, a moiety is chemically inert. In some cases, a moiety is configured to support a desired chemical reaction, for example, one or more processes in a polynucleotide synthesis reaction. The surface energy, or hydrophobicity, of a surface is a factor for determining the affinity of a nucleotide to attach onto the surface. In some instances, a method for substrate functionalization comprises: (a) providing a substrate having a surface that comprises silicon dioxide; and (b) silanizing the surface using, a suitable silanizing agent described herein or otherwise known in the art, for example, an organofunctional alkoxysilane molecule. Methods and functionalizing agents are described in U.S. Pat. No. 5,474,796, which is herein incorporated by reference in its entirety.

[0117] In some instances, a substrate surface is functionalized by contact with a derivatizing composition that contains a mixture of silanes, under reaction conditions effective to couple the silanes to the substrate surface, typically via reactive hydrophilic moieties present on the substrate surface. Silanization generally covers a surface through self-assembly with organofunctional alkoxysilane molecules. A variety of siloxane functionalizing reagents can further be used as currently known in the art, e.g., for lowering or increasing surface energy. The organofunctional alkoxysilanes are classified according to their organic functions.

### Polynucleotide Synthesis

[0118] Methods of the current disclosure for polynucleotide synthesis may include processes involving phosphoramidite chemistry. In some instances, polynucleotide synthesis comprises coupling a base with phosphoramidite. Polynucleotide synthesis may comprise coupling a base by deposition of phosphoramidite under coupling conditions, wherein the same base is optionally deposited with phosphoramidite more than once, i.e., double coupling. Polynucleotide synthesis may comprise capping of unreacted sites. In some instances, capping is optional. Polynucleotide synthesis may also comprise oxidation or an oxidation step or oxidation steps. Polynucleotide synthesis may comprise deblocking, detritylation, and sulfurization. In some instances, polynucleotide synthesis comprises either oxidation or sulfurization. In some instances, between one or each step during a polynucleotide synthesis reaction, the device is washed, for example, using tetrazole or acetonitrile. Time frames for any one step in a phosphoramidite synthesis method may be less than about 2 min, 1 min, 50 sec, 40 sec, 30 sec, 20 sec and 10 sec.

[0119] Polynucleotide synthesis using a phosphoramidite method may comprise a subsequent addition of a phosphoramidite building block (e.g., nucleoside phosphoramidite) to a growing polynucleotide chain for the formation of a phosphite triester linkage. Phosphoramidite polynucleotide synthesis proceeds in the 3′ to 5′ direction. Phosphoramidite polynucleotide synthesis allows for the controlled addition of one nucleotide to a growing nucleic acid chain per synthesis cycle. In some instances, each synthesis cycle comprises a coupling step. Phosphoramidite coupling involves the formation of a phosphite triester linkage between an activated nucleoside phosphoramidite and a nucleoside bound to the substrate, for example, via a linker. In some instances, the nucleoside phosphoramidite is provided to the device activated. In some instances, the nucleoside phosphoramidite is provided to the device with an activator. In some instances, nucleoside phosphoramidites are provided to the device in a 1.5, 2, 3, 4, 5, 6, 7, 8, 9, 10, 11, 12, 13, 14, 15, 16, 17, 18, 19, 20, 25, 30, 35, 40, 50, 60, 70, 80, 90, 100-fold excess or more over the substrate-bound nucleosides. In some instances, the addition of nucleoside phosphoramidite is performed in an anhydrous environment, for example, in anhydrous acetonitrile. Following addition of a nucleoside phosphoramidite, the device is optionally washed. In some instances, the coupling step is repeated one or more additional times, optionally with a wash step between nucleoside phosphoramidite additions to the substrate. In some instances, a polynucleotide synthesis method used herein comprises 1, 2, 3 or more sequential coupling steps. Prior to coupling, in many cases, the nucleoside bound to the device is de-protected by removal of a protecting group, where the protecting group functions to prevent polymerization. A common protecting group is 4,4′-dimethoxytrityl (DMT).

[0120] Following coupling, phosphoramidite polynucleotide synthesis methods optionally comprise a capping step. In a capping step, the growing polynucleotide is treated with a capping agent. A capping step is useful to block unreacted substrate-bound 5′-OH groups after coupling from further chain elongation, preventing the formation of polynucleotides with internal base deletions. Further, phosphoramidites activated with 1H-tetrazole may react, to a small extent, with the O6 position of guanosine. Without being bound by theory, upon oxidation with I₂/water, this side product, possibly via O6-N7 migration, may undergo depurination. The apurinic sites may end up being cleaved in the course of the final deprotection of the polynucleotide thus reducing the yield of the full-length product. The O6 modifications may be removed by treatment with the capping reagent prior to oxidation with I₂/water. In some instances, inclusion of a capping step during polynucleotide synthesis decreases the error rate as compared to synthesis without capping. As an example, the capping step comprises treating the substrate-bound polynucleotide with a mixture of acetic anhydride and 1-methylimidazole. Following a capping step, the device is optionally washed.

[0121] In some instances, following addition of a nucleoside phosphoramidite, and optionally after capping and one or more wash steps, the device bound growing nucleic acid is oxidized. The oxidation step comprises the phosphite triester is oxidized into a tetracoordinated phosphate triester, a protected precursor of the naturally occurring phosphate diester intemucleoside linkage. In some instances, oxidation of the growing polynucleotide is achieved by treatment with iodine and water, optionally in the presence of a weak base (e.g., pyridine, lutidine, collidine). Oxidation may be carried out under anhydrous conditions using, e.g. tert-Butyl hydroperoxide or (1S)-(+)-(10-camphorsulfonyl)-oxaziridine (CSO). In some methods, a capping step is performed following oxidation. A second capping step allows for device drying, as residual water from oxidation that may persist can inhibit subsequent coupling. Following oxidation, the device and growing polynucleotide is optionally washed. In some instances, the step of oxidation is substituted with a sulfurization step to obtain polynucleotide phosphorothioates, wherein any capping steps can be performed after the sulfurization. Many reagents are capable of the efficient sulfur transfer, including but not limited to 3-(Dimethylaminomethylidene)amino)-3H-1,2,4-dithiazole-3-thione, DDTT, 3H-1,2-benzodithiol-3-one 1,1-dioxide, also known as Beaucage reagent, and N,N,N′N′-Tetraethylthiuram disulfide (TETD).

[0122] In order for a subsequent cycle of nucleoside incorporation to occur through coupling, the protected 5′ end of the device bound growing polynucleotide is removed so that the primary hydroxyl group is reactive with a next nucleoside phosphoramidite. In some instances, the protecting group is DMT and deblocking occurs with trichloroacetic acid in dichloromethane. Conducting detritylation for an extended time or with stronger than recommended solutions of acids may lead to increased depurination of solid support-bound polynucleotide and thus reduces the yield of the desired full-length product. Methods and compositions of the disclosure described herein provide for controlled deblocking conditions limiting undesired depurination reactions. In some instances, the device bound polynucleotide is washed after deblocking. In some instances, efficient washing after deblocking contributes to synthesized polynucleotides having a low error rate.

[0123] Methods for the synthesis of polynucleotides typically involve an iterating sequence of the following steps: application of a protected monomer to an actively functionalized surface (e.g., locus) to link with either the activated surface, a linker or with a previously deprotected monomer; deprotection of the applied monomer so that it is reactive with a subsequently applied protected monomer; and application of another protected monomer for linking. One or more intermediate steps include oxidation or sulfurization. In some instances, one or more wash steps precede or follow one or all of the steps.

[0124] Methods for phosphoramidite-based polynucleotide synthesis comprise a series of chemical steps. In some instances, one or more steps of a synthesis method involve reagent cycling, where one or more steps of the method comprise application to the device of a reagent useful for the step. For example, reagents are cycled by a series of liquid deposition and vacuum drying steps. For substrates comprising three-dimensional features such as wells, microwells, channels and the like, reagents are optionally passed through one or more regions of the device via the wells and/or channels.

[0125] Methods and systems described herein relate to polynucleotide synthesis devices for the synthesis of polynucleotides. The synthesis may be in parallel. For example, at least or about at least 2, 3, 4, 5, 6, 7, 8, 9, 10, 11, 12, 13, 14, 15, 16, 17, 18, 19, 20, 21, 22, 23, 24, 25, 30, 35, 40, 45, 50, 100, 150, 200, 250, 300, 350, 400, 450, 500, 550, 600, 650, 700, 750, 800, 850, 900, 1000, 10000, 50000, 75000, 100000 or more polynucleotides can be synthesized in parallel. The total number polynucleotides that may be synthesized in parallel may be from 2-100000, 3-50000, 4-10000, 5-1000, 6-900, 7-850, 8-800, 9-750, 10-700, 11-650, 12-600, 13-550, 14-500, 15-450, 16-400, 17-350, 18-300, 19-250, 20-200, 21-150,22-100, 23-50, 24-45, 25-40, 30-35. Those of skill in the art appreciate that the total number of polynucleotides synthesized in parallel may fall within any range bound by any of these values, for example 25-100. The total number of polynucleotides synthesized in parallel may fall within any range defined by any of the values serving as endpoints of the range. Total molar mass of polynucleotides synthesized within the device or the molar mass of each of the polynucleotides may be at least or at least about 10, 20, 30, 40, 50, 100, 250, 500, 750, 1000, 2000, 3000, 4000, 5000, 6000, 7000, 8000, 9000, 10000, 25000, 50000, 75000, 100000 picomoles, or more. The length of each of the polynucleotides or average length of the polynucleotides within the device may be at least or about at least 10, 15, 20, 25, 30, 35, 40, 45, 50, 100, 150, 200, 300, 400, 500 nucleotides, or more. The length of each of the polynucleotides or average length of the polynucleotides within the device may be at most or about at most 500, 400, 300, 200, 150, 100, 50, 45, 35, 30, 25, 20, 19, 18, 17, 16, 15, 14, 13, 12, 11, 10 nucleotides, or less. The length of each of the polynucleotides or average length of the polynucleotides within the device may fall from 10-500, 9-400, 11-300, 12-200, 13-150, 14-100, 15-50, 16-45, 17-40, 18-35, 19-25. Those of skill in the art appreciate that the length of each of the polynucleotides or average length of the polynucleotides within the device may fall within any range bound by any of these values, for example 100-300. The length of each of the polynucleotides or average length of the polynucleotides within the device may fall within any range defined by any of the values serving as endpoints of the range.

[0126] Methods for polynucleotide synthesis on a surface provided herein allow for synthesis at a fast rate. As an example, at least 3, 4, 5, 6, 7, 8, 9, 10, 11, 12, 13, 14, 15, 16, 17, 18, 19, 20, 21, 22, 23, 24, 25, 26, 27, 28, 29, 30, 35, 40, 45, 50, 55, 60, 70, 80, 90, 100, 125, 150, 175, 200 nucleotides per hour, or more are synthesized. Nucleotides include adenine, guanine, thymine, cytosine, uridine building blocks, or analogs/modified versions thereof. In some instances, libraries of polynucleotides are synthesized in parallel on substrate. For example, a device comprising about or at least about 100; 1,000; 10,000; 30,000; 75,000; 100,000; 1,000,000; 2,000,000; 3,000,000; 4,000,000; or 5,000,000 resolved loci is able to support the synthesis of at least the same number of distinct polynucleotides, wherein polynucleotide encoding a distinct sequence is synthesized on a resolved locus. In some instances, a library of polynucleotides is synthesized on a device with low error rates described herein in less than about three months, two months, one month, three weeks, 15, 14, 13, 12, 11, 10, 9, 8, 7, 6, 5, 4, 3, 2 days, 24 hours or less. In some instances, larger nucleic acids assembled from a polynucleotide library synthesized with low error rate using the substrates and methods described herein are prepared in less than about three months, two months, one month, three weeks, 15, 14, 13, 12, 11, 10, 9, 8, 7, 6, 5, 4, 3, 2 days, 24 hours or less.

[0127] In some instances, methods described herein provide for generation of a library of nucleic acids comprising variant nucleic acids differing at a plurality of codon sites. In some instances, a nucleic acid may have 1 site, 2 sites, 3 sites, 4 sites, 5 sites, 6 sites, 7 sites, 8 sites, 9 sites, 10 sites, 11 sites, 12 sites, 13 sites, 14 sites, 15 sites, 16 sites, 17 sites 18 sites, 19 sites, 20 sites, 30 sites, 40 sites, 50 sites, or more of variant codon sites.

[0128] In some instances, the one or more sites of variant codon sites may be adjacent. In some instances, the one or more sites of variant codon sites may not be adjacent and separated by 1, 2, 3, 4, 5, 6, 7, 8, 9, 10, or more codons.

[0129] In some instances, a nucleic acid may comprise multiple sites of variant codon sites, wherein all the variant codon sites are adjacent to one another, forming a stretch of variant codon sites. In some instances, a nucleic acid may comprise multiple sites of variant codon sites, wherein none the variant codon sites are adjacent to one another. In some instances, a nucleic acid may comprise multiple sites of variant codon sites, wherein some the variant codon sites are adjacent to one another, forming a stretch of variant codon sites, and some of the variant codon sites are not adjacent to one another.

[0130] Referring to the Figures, FIG. 1 illustrates an exemplary process workflow for synthesis of nucleic acids (e.g., genes) from shorter nucleic acids. The workflow is divided generally into phases: (1) de novo synthesis of a single stranded nucleic acid library, (2) joining nucleic acids to form larger fragments, (3) error correction, (4) quality control, and (5) shipment. Prior to de novo synthesis, an intended nucleic acid sequence or group of nucleic acid sequences is preselected. For example, a group of genes is preselected for generation.

[0131] Once large nucleic acids for generation are selected, a predetermined library of nucleic acids is designed for de novo synthesis. Various suitable methods are known for generating high density polynucleotide arrays. In the workflow example, a device surface layer is provided. In the example, chemistry of the surface is altered in order to improve the polynucleotide synthesis process. Areas of low surface energy are generated to repel liquid while areas of high surface energy are generated to attract liquids. The surface itself may be in the form of a planar surface or contain variations in shape, such as protrusions or microwells which increase surface area. In the workflow example, high surface energy molecules selected serve a dual function of supporting DNA chemistry, as disclosed in International Patent Application Publication WO/2015/021080, which is herein incorporated by reference in its entirety.

[0132] In situ preparation of polynucleotide arrays is generated on a solid support and utilizes single nucleotide extension process to extend multiple oligomers in parallel. A deposition device, such as a material deposition device, is designed to release reagents in a step wise fashion such that multiple polynucleotides extend, in parallel, one residue at a time to generate oligomers with a predetermined nucleic acid sequence 102. In some instances, polynucleotides are cleaved from the surface at this stage. Cleavage includes gas cleavage, e.g., with ammonia or methylamine.

[0133] The generated polynucleotide libraries are placed in a reaction chamber. In this exemplary workflow, the reaction chamber (also referred to as “nanoreactor”) is a silicon coated well, containing PCR reagents and lowered onto the polynucleotide library 103. Prior to or after the sealing 104 of the polynucleotides, a reagent is added to release the polynucleotides from the substrate. In the exemplary workflow, the polynucleotides are released subsequent to sealing of the nanoreactor 105. Once released, fragments of single stranded polynucleotides hybridize in order to span an entire long range sequence of DNA. Partial hybridization 105 is possible because each synthesized polynucleotide is designed to have a small portion overlapping with at least one other polynucleotide in the pool.

[0134] After hybridization, a PCA reaction is commenced. During the polymerase cycles, the polynucleotides anneal to complementary fragments and gaps are filled in by a polymerase. Each cycle increases the length of various fragments randomly depending on which polynucleotides find each other. Complementarity amongst the fragments allows for forming a complete large span of double stranded DNA 106.

[0135] After PCA is complete, the nanoreactor is separated from the device 107 and positioned for interaction with a device having primers for PCR 108. After sealing, the nanoreactor is subject to PCR 109 and the larger nucleic acids are amplified. After PCR 110, the nanochamber is opened 111, error correction reagents are added 112, the chamber is sealed 113 and an error correction reaction occurs to remove mismatched base pairs and/or strands with poor complementarity from the double stranded PCR amplification products 114. The nanoreactor is opened and separated 115. Error corrected product is next subject to additional processing steps, such as PCR and molecular bar coding, and then packaged 122 for shipment 123.

[0136] In some instances, quality control measures are taken. After error correction, quality control steps include for example interaction with a wafer having sequencing primers for amplification of the error corrected product 116, sealing the wafer to a chamber containing error corrected amplification product 117, and performing an additional round of amplification 118. The nanoreactor is opened 119 and the products are pooled 120 and sequenced 121. After an acceptable quality control determination is made, the packaged product 122 is approved for shipment 123.

[0137] In some instances, a nucleic acid generated by a workflow such as that in FIG. 1 is subject to mutagenesis using overlapping primers disclosed herein. In some instances, a library of primers are generated by in situ preparation on a solid support and utilize single nucleotide extension process to extend multiple oligomers in parallel. A deposition device, such as a material deposition device, is designed to release reagents in a step wise fashion such that multiple polynucleotides extend, in parallel, one residue at a time to generate oligomers with a predetermined nucleic acid sequence 102.

### Computer Systems

[0138] Any of the systems described herein, may be operably linked to a computer and may be automated through a computer either locally or remotely. In various instances, the methods and systems of the disclosure may further comprise software programs on computer systems and use thereof. Accordingly, computerized control for the synchronization of the dispense/vacuum/refill functions such as orchestrating and synchronizing the material deposition device movement, dispense action and vacuum actuation are within the bounds of the disclosure. The computer systems may be programmed to interface between the user specified base sequence and the position of a material deposition device to deliver the correct reagents to specified regions of the substrate.

[0139] The computer system 200 illustrated in FIG. 2 may be understood as a logical apparatus that can read instructions from media 211 and/or a network port 205, which can optionally be connected to server 209 having fixed media 212. The system, such as shown in FIG. 2 can include a CPU 201, disk drives 203, optional input devices such as keyboard 215 and/or mouse 216 and optional monitor 207. Data communication can be achieved through the indicated communication medium to a server at a local or a remote location. The communication medium can include any means of transmitting and/or receiving data. For example, the communication medium can be a network connection, a wireless connection or an internet connection. Such a connection can provide for communication over the World Wide Web. It is envisioned that data relating to the present disclosure can be transmitted over such networks or connections for reception and/or review by a party 222 as illustrated in FIG. 2.

[0140] As illustrated in FIG. 3, a high speed cache 304 can be connected to, or incorporated in, the processor 302 to provide a high speed memory for instructions or data that have been recently, or are frequently, used by processor 302. The processor 302 is connected to a north bridge 306 by a processor bus 308. The north bridge 306 is connected to random access memory (RAM) 310 by a memory bus 312 and manages access to the RAM 310 by the processor 302. The north bridge 306 is also connected to a south bridge 314 by a chipset bus 316. The south bridge 314 is, in turn, connected to a peripheral bus 318. The peripheral bus can be, for example, PCI, PCI-X, PCI Express, or other peripheral bus. The north bridge and south bridge are often referred to as a processor chipset and manage data transfer between the processor, RAM, and peripheral components on the peripheral bus 318. In some alternative architectures, the functionality of the north bridge can be incorporated into the processor instead of using a separate north bridge chip. In some instances, system 300 can include an accelerator card 322 attached to the peripheral bus 318. The accelerator can include field programmable gate arrays (FPGAs) or other hardware for accelerating certain processing. For example, an accelerator can be used for adaptive data restructuring or to evaluate algebraic expressions used in extended set processing.

[0141] Software and data are stored in external storage 324 and can be loaded into RAM 310 and/or cache 304 for use by the processor. The system 300 includes an operating system for managing system resources; non-limiting examples of operating systems include: Linux, WindowsTM, MACOSTM, BlackBerry OSTM, iOSTM, and other functionally-equivalent operating systems, as well as application software running on top of the operating system for managing data storage and optimization in accordance with example instances of the present disclosure. In this example, system 300 also includes network interface cards (NICs) 320 and 321 connected to the peripheral bus for providing network interfaces to external storage, such as Network Attached Storage (NAS) and other computer systems that can be used for distributed parallel processing.

[0142] FIG. 4 is a diagram showing a network 400 with a plurality of computer systems 402a, and 402b, a plurality of cell phones and personal data assistants 402c, and Network Attached Storage (NAS) 404a, and 404b. In example instances, systems 402a, 402b, and 402c can manage data storage and optimize data access for data stored in Network Attached Storage (NAS) 404a and 404b. A mathematical model can be used for the data and be evaluated using distributed parallel processing across computer systems 402a, and 402b, and cell phone and personal data assistant systems 402c. Computer systems 402a, and 402b, and cell phone and personal data assistant systems 402c can also provide parallel processing for adaptive data restructuring of the data stored in Network Attached Storage (NAS) 404a and 404b. FIG. 4 illustrates an example only, and a wide variety of other computer architectures and systems can be used in conjunction with the various instances of the present disclosure. For example, a blade server can be used to provide parallel processing. Processor blades can be connected through a back plane to provide parallel processing. Storage can also be connected to the back plane or as Network Attached Storage (NAS) through a separate network interface. In some example instances, processors can maintain separate memory spaces and transmit data through network interfaces, back plane or other connectors for parallel processing by other processors. In other instances, some or all of the processors can use a shared virtual address memory space.

[0143] FIG. 5 is a block diagram of a multiprocessor computer system 500 using a shared virtual address memory space in accordance with an example instance. The system includes a plurality of processors 502a-f that can access a shared memory subsystem 504. The system incorporates a plurality of programmable hardware memory algorithm processors (MAPs) 506a-f in the memory subsystem 504. Each MAP 506a-f can comprise a memory 508a-f and one or more field programmable gate arrays (FPGAs) 510a-f. The MAP provides a configurable functional unit and particular algorithms or portions of algorithms can be provided to the FPGAs 510a-f for processing in close coordination with a respective processor. For example, the MAPs can be used to evaluate algebraic expressions regarding the data model and to perform adaptive data restructuring in example instances. In this example, each MAP is globally accessible by all of the processors for these purposes. In one configuration, each MAP can use Direct Memory Access (DMA) to access an associated memory 508a-f, allowing it to execute tasks independently of, and asynchronously from the respective microprocessor 502a-f In this configuration, a MAP can feed results directly to another MAP for pipelining and parallel execution of algorithms.

[0144] The above computer architectures and systems are examples only, and a wide variety of other computer, cell phone, and personal data assistant architectures and systems can be used in connection with example instances, including systems using any combination of general processors, co-processors, FPGAs and other programmable logic devices, system on chips (SOCs), application specific integrated circuits (ASICs), and other processing and logic elements. In some instances, all or part of the computer system can be implemented in software or hardware. Any variety of data storage media can be used in connection with example instances, including random access memory, hard drives, flash memory, tape drives, disk arrays, Network Attached Storage (NAS) and other local or distributed data storage devices and systems.

[0145] In example instances, the computer system can be implemented using software modules executing on any of the above or other computer architectures and systems. In other instances, the functions of the system can be implemented partially or completely in firmware, programmable logic devices such as field programmable gate arrays (FPGAs) as referenced in FIG. 3, system on chips (SOCs), application specific integrated circuits (ASICs), or other processing and logic elements. For example, the Set Processor and Optimizer can be implemented with hardware acceleration through the use of a hardware accelerator card, such as accelerator card 322 illustrated in FIG. 3.

[0146] The following examples are set forth to illustrate more clearly the principle and practice of embodiments disclosed herein to those skilled in the art and are not to be construed as limiting the scope of any claimed embodiments. Unless otherwise stated, all parts and percentages are on a weight basis.

### EXAMPLES

[0147] The following examples are given for the purpose of illustrating various embodiments of the disclosure and are not meant to limit the present disclosure in any fashion. The present examples, along with the methods described herein are presently representative of preferred embodiments, are exemplary, and are not intended as limitations on the scope of the disclosure. Changes therein and other uses which are encompassed within the spirit of the disclosure as defined by the scope of the claims will occur to those skilled in the art.

### Example 1: Functionalization of a Device Surface

[0148] A device was functionalized to support the attachment and synthesis of a library of polynucleotides. The device surface was first wet cleaned using a piranha solution comprising 90% H₂SO₄ and 10% H₂O₂ for 20 minutes. The device was rinsed in several beakers with DI water, held under a DI water gooseneck faucet for 5 min, and dried with N₂. The device was subsequently soaked in NH₄OH (1:100; 3 mL:300 mL) for 5 min, rinsed with DI water using a handgun, soaked in three successive beakers with DI water for 1 min each, and then rinsed again with DI water using the handgun. The device was then plasma cleaned by exposing the device surface to O₂ . A SAMCO PC-300 instrument was used to plasma etch O₂ at 250 watts for 1 min in downstream mode.

[0149] The cleaned device surface was actively functionalized with a solution comprising N-(3-triethoxysilylpropyl)-4-hydroxybutyramide using a YES-1224P vapor deposition oven system with the following parameters: 0.5 to 1 torr, 60 min, 70° C., 135° C. vaporizer. The device surface was resist coated using a Brewer Science 200X spin coater. SPR™ 3612 photoresist was spin coated on the device at 2500 rpm for 40 sec. The device was pre-baked for 30 min at 90° C. on a Brewer hot plate. The device was subjected to photolithography using a Karl Suss MA6 mask aligner instrument. The device was exposed for 2.2 sec and developed for 1 min in MSF 26A. Remaining developer was rinsed with the handgun and the device soaked in water for 5 min. The device was baked for 30 min at 100° C. in the oven, followed by visual inspection for lithography defects using a Nikon L200. A descum process was used to remove residual resist using the SAMCO PC-300 instrument to O₂ plasma etch at 250 watts for 1 min.

[0150] The device surface was passively functionalized with a 100 μL solution of perfluorooctyltrichlorosilane mixed with 10 μL light mineral oil. The device was placed in a chamber, pumped for 10 min, and then the valve was closed to the pump and left to stand for 10 min. The chamber was vented to air. The device was resist stripped by performing two soaks for 5 min in 500 mL NMP at 70° C. with ultrasonication at maximum power (9 on Crest system). The device was then soaked for 5 min in 500 mL isopropanol at room temperature with ultrasonication at maximum power. The device was dipped in 300 mL of 200 proof ethanol and blown dry with N₂. The functionalized surface was activated to serve as a support for polynucleotide synthesis.

### Example 2: Synthesis of a 50-mer Sequence on an oligonucleotide Synthesis Device

[0151] A two-dimensional oligonucleotide synthesis device was assembled into a flowcell, which was connected to a flowcell (Applied Biosystems (ABI394 DNA Synthesizer“). The two-dimensional oligonucleotide synthesis device was uniformly functionalized with N-(3-TRIETHOXYSILYLPROPYL)-4-HYDROXYBUTYRAMIDE (Gelest) was used to synthesize an exemplary polynucleotide of 50 bp (“50-mer polynucleotide”) using polynucleotide synthesis methods described herein.

[0152] The sequence of the 50-mer was as described in SEQ ID NO.: 2239. 5′AGACAATCAACCATTTGGGGTGGACAGCCTTGACCTCTAGACTTCGGCAT##TTTTTTT TTT3′ (SEQ ID NO.: 2239), where # denotes Thymidine-succinyl hexamide CED phosphoramidite (CLP-2244 from ChemGenes), which is a cleavable linker enabling the release of oligos from the surface during deprotection.

[0153] The synthesis was done using standard DNA synthesis chemistry (coupling, capping, oxidation, and deblocking) according to the protocol in Table 2 and an ABI synthesizer.

TABLE 2
Synthesis protocols

| General DNA Synthesis | Table 2 | |
|---|---|---|
| Process Name | Process Step | Time (sec) |
| WASH (Acetonitrile Wash | Acetonitrile System Flush | 4 |
| Flow) | Acetonitrile to Flowcell | 23 |
| | N2 System Flush | 4 |
| | Acetonitrile System Flush | 4 |
| DNA BASE ADDITION | Activator Manifold Flush | 2 |
| (Phosphoramidite + | Activator to Flowcell | 6 |
| Activator Flow) | Activator + | 6 |
| | Phosphoramidite to | |
| | Flowcell | |
| | Activator to Flowcell | 0.5 |
| | Activator + | 5 |
| | Phosphoramidite to | |
| | Flowcell | |
| | Activator to Flowcell | 0.5 |
| | Activator + | 5 |
| | Phosphoramidite to | |
| | Flowcell | |
| | Activator to Flowcell | 0.5 |
| | Activator + | 5 |
| | Phosphoramidite to | |
| | Flowcell | |
| | Incubate for 25 sec | 25 |
| WASH (Acetonitrile Wash | Acetonitrile System Flush | 4 |
| Flow) | Acetonitrile to Flowcell | 15 |
| | N2 System Flush | 4 |
| | Acetonitrile System Flush | 4 |
| DNA BASE ADDITION | Activator Manifold Flush | 2 |
| (Phosphoramidite + | Activator to Flowcell | 5 |
| Activator Flow) | Activator + | 18 |
| | Phosphoramidite to | |
| | Flowcell | |
| | Incubate for 25 sec | 25 |
| WASH (Acetonitrile Wash | Acetonitrile System Flush | 4 |
| Flow) | Acetonitrile to Flowcell | 15 |
| | N2 System Flush | 4 |
| | Acetonitrile System Flush | 4 |
| CAPPING (CapA + B, 1:1, | CapA + B to Flowcell | 15 |
| Flow) | | |
| WASH (Acetonitrile Wash | Acetonitrile System Flush | 4 |
| Flow) | Acetonitrile to Flowcell | 15 |
| | Acetonitrile System Flush | 4 |
| OXIDATION (Oxidizer | Oxidizer to Flowcell | 18 |
| Flow) | | |
| WASH (Acetonitrile Wash | Acetonitrile System Flush | 4 |
| Flow) | N2 System Flush | 4 |
| | Acetonitrile System Flush | 4 |
| | Acetonitrile to Flowcell | 15 |
| | Acetonitrile System Flush | 4 |
| | Acetonitrile to Flowcell | 15 |
| | N2 System Flush | 4 |
| | Acetonitrile System Flush | 4 |
| | Acetonitrile to Flowcell | 23 |
| | N2 System Flush | 4 |
| | Acetonitrile System Flush | 4 |
| DEBLOCKING (Deblock | Deblock to Flowcell | 36 |
| Flow) | | |
| WASH (Acetonitrile Wash | Acetonitrile System Flush | 4 |
| Flow) | N2 System Flush | 4 |
| | Acetonitrile System Flush | 4 |
| | Acetonitrile to Flowcell | 18 |
| | N2 System Flush | 4.13 |
| | Acetonitrile System Flush | 4.13 |
| | Acetonitrile to Flowcell | 15 |

[0154] The phosphoramidite/activator combination was delivered similar to the delivery of bulk reagents through the flowcell. No drying steps were performed as the environment stays “wet” with reagent the entire time.

[0155] The flow restrictor was removed from the ABI 394 synthesizer to enable faster flow. Without flow restrictor, flow rates for amidites (0.1 M in ACN), Activator, (0.25 M Benzoylthiotetrazole (“BTT”; 30-3070-xx from GlenResearch) in ACN), and Ox (0.02 M I2 in 20% pyridine, 10% water, and 70% THF) were roughly ˜100 uL/sec, for acetonitrile (“ACN”) and capping reagents (1:1 mix of CapA and CapB, wherein CapA is acetic anhydride in THF/Pyridine and CapB is 16% 1-methylimidizole in THF), roughly ˜200 uL/sec, and for Deblock (3% dichloroacetic acid in toluene), roughly ˜300 uL/sec (compared to ˜50 uL/sec for all reagents with flow restrictor). The time to completely push out Oxidizer was observed, the timing for chemical flow times was adjusted accordingly and an extra ACN wash was introduced between different chemicals. After polynucleotide synthesis, the chip was deprotected in gaseous ammonia overnight at 75 psi. Five drops of water were applied to the surface to recover polynucleotides. The recovered polynucleotides were then analyzed on a BioAnalyzer small RNA chip.

### Example 3: Synthesis of a 100-mer Sequence on an Oligonucleotide Synthesis Device

[0156] The same process as described in Example 2 for the synthesis of the 50-mer sequence was used for the synthesis of a 100-mer polynucleotide (“100-mer polynucleotide”; 5′ CGGGATCCTTATCGTCATCGTCGTACAGATCCCGACCCATTTGCTGTCCACCAGTCATG CTAGCCATACCATGATGATGATGATGATGAGAACCCCGCAT##TTTTTTTTTT3′, where # denotes Thymidine-succinyl hexamide CED phosphoramidite (CLP-2244 from ChemGenes); SEQ ID NO.: 2240) on two different silicon chips, the first one uniformly functionalized with N-(3-TRIETHOXYSILYLPROPYL)-4-HYDROXYBUTYRAMIDE and the second one functionalized with 5/95 mix of 11-acetoxyundecyltriethoxysilane and n-decyltriethoxysilane, and the polynucleotides extracted from the surface were analyzed on a BioAnalyzer instrument.

[0157] All ten samples from the two chips were further PCR amplified using a forward (5′ATGCGGGGTTCTCATCATC3′; SEQ ID NO.: 2241) and a reverse (5′CGGGATCCTTATCGTCATCG3′; SEQ ID NO.: 2242) primer in a 50 uL PCR mix (25 uL NEB Q5 mastermix, 2.5 uL 10 uM Forward primer, 2.5 uL 10 uM Reverse primer, luL polynucleotide extracted from the surface, and water up to 50 uL) using the following thermalcycling program:
[0158] 98° C., 30 sec
[0159] 98° C., 10 sec; 63° C., 10 sec; 72° C., 10 sec; repeat 12 cycles
[0160] 72° C., 2 min

[0161] The PCR products were also run on a BioAnalyzer, demonstrating sharp peaks at the 100-mer position. Next, the PCR amplified samples were cloned, and Sanger sequenced. Table 3 summarizes the results from the Sanger sequencing for samples taken from spots 1-5 from chip 1 and for samples taken from spots 6-10 from chip 2.

TABLE 3
Sequencing results

| | | |
|---|---|---|
| Spot | Error rate | Cycle efficiency |

| | | | |
|---|---|---|---|
| 1 | 1/763 | bp | 99.87% |
| 2 | 1/824 | bp | 99.88% |
| 3 | 1/780 | bp | 99.87% |
| 4 | 1/429 | bp | 99.77% |
| 5 | 1/1525 | bp | 99.93% |
| 6 | 1/1615 | bp | 99.94% |
| 7 | 1/531 | bp | 99.81% |
| 8 | 1/1769 | bp | 99.94% |
| 9 | 1/854 | bp | 99.88% |
| 10 | 1/1451 | bp | 99.93% |

[0162] Thus, the high quality and uniformity of the synthesized polynucleotides were repeated on two chips with different surface chemistries. Overall, 89% of the 100-mers that were sequenced were perfect sequences with no errors, corresponding to 233 out of 262.

[0163] Table 4 summarizes error characteristics for the sequences obtained from the polynucleotide samples from spots 1-10.

TABLE 4
Error characteristics

| Sample ID/Spot no. | OSA_0046/1 | OSA_0047/2 | OSA_0048/3 | OSA_0049/4 | OSA_0050/5 |
|---|---|---|---|---|---|
| Total Sequences | 32 | 32 | 32 | 32 | 32 |
| Sequencing Quality | 25 of 28 | 27 of 27 | 26 of 30 | 21 of 23 | 25 of 26 |
| Oligo Quality | 23 of 25 | 25 of 27 | 22 of 26 | 18 of 21 | 24 of 25 |
| ROI Match Count | 2500 | 2698 | 2561 | 2122 | 2499 |
| ROI Mutation | 2 | 2 | 1 | 3 | 1 |
| ROI Multi Base Deletion | 0 | 0 | 0 | 0 | 0 |
| ROI Small Insertion | 1 | 0 | 0 | 0 | 0 |
| ROI Single Base Deletion | 0 | 0 | 0 | 0 | 0 |
| Large Deletion Count | 0 | 0 | 1 | 0 | 0 |
| Mutation: G > A | 2 | 2 | 1 | 2 | 1 |
| Mutation: T > C | 0 | 0 | 0 | 1 | 0 |
| ROI Error Count | 3 | 2 | 2 | 3 | 1 |
| ROI Error Rate | Err: ~1 in 834 | Err: ~1 in 1350 | Err: ~1 in 1282 | Err: ~1 in 708 | Err: ~1 in 2500 |
| ROI Minus Primer Error Rate | MP Err: ~1 in 763 | MP Err: ~1 in 824 | MP Err: ~1 in 780 | MP Err: ~1 in 429 | MP Err: ~1 in 1525 |
| Sample ID/Spot no. | OSA_0051/6 | OSA_0052/7 | OSA_0053/8 | OSA_0054/9 | OSA_0055/10 |
| Total Sequences | 32 | 32 | 32 | 32 | 32 |
| Sequencing Quality | 29 of 30 | 27 of 31 | 29 of 31 | 28 of 29 | 25 of 28 |
| Oligo Quality | 25 of 29 | 22 of 27 | 28 of 29 | 26 of 28 | 20 of 25 |
| ROI Match Count | 2666 | 2625 | 2899 | 2798 | 2348 |
| ROI Mutation | 0 | 2 | 1 | 2 | 1 |
| ROI Multi Base Deletion | 0 | 0 | 0 | 0 | 0 |
| ROI Small Insertion | 0 | 0 | 0 | 0 | 0 |
| ROI Single Base Deletion | 0 | 0 | 0 | 0 | 0 |
| Large Deletion Count | 1 | 1 | 0 | 0 | 0 |
| Mutation: G > A | 0 | 2 | 1 | 2 | 1 |
| Mutation: T > C | 0 | 0 | 0 | 0 | 0 |
| ROI Error Count | 1 | 3 | 1 | 2 | 1 |
| ROI Error Rate | Err: ~1 in 2667 | Err: ~1 in 876 | Err: ~1 in 2900 | Err: ~1 in 1400 | Err: ~1 in 2349 |
| ROI Minus Primer Error Rate | MP Err: ~1 in 1615 | MP Err: ~1 in 531 | MP Err: ~1 in 1769 | MP Err: ~1 in 854 | MP Err: ~1 in 1451 |

### Example 4: VHH Libraries

[0164] Synthetic VHH libraries were developed. For the ‘VHH Ratio’ library with tailored CDR diversity, 2391 VHH sequences (iCAN database) were aligned using Clustal Omega to determine the consensus at each position and the framework was derived from the consensus at each position. The CDRs of all of the 2391 sequences were analyzed for position-specific variation, and this diversity was introduced in the library design. For the ‘VHH Shuffle’ library with shuffled CDR diversity, the iCAN database was scanned for unique CDRs in the nanobody sequences. 1239 unique CDR1′s, 1600 unique CDR2′s, and 1608 unique CDR3′s were identified and the framework was derived from the consensus at each framework position amongst the 2391 sequences in the iCAN database. Each of the unique CDR's was individually synthesized and shuffled in the consensus framework to generate a library with theoretical diversity of 3.2×10\hat{ }9. The library was then cloned in the phagemid vector using restriction enzyme digest. For the ‘VHH hShuffle’ library (a synthetic “human” VHH library with shuffled CDR diversity), the iCAN database was scanned for unique CDRs in the nanobody sequences. 1239 unique CDR1's, 1600 unique CDR2′s, and 1608 unique CDR3′s were identified and framework 1, 3, and 4 was derived from the human germline DP-47 framework. Framework 2 was derived from the consensus at each framework position amongst the 2391 sequences in the iCAN database. Each of the unique CDR's was individually synthesized and shuffled in the partially humanized framework using the NUGE tool to generate a library with theoretical diversity of 3.2×10\hat{ }9. The library was then cloned in the phagemid vector using the NUGE tool.

[0165] The Carterra SPR system was used to assess binding affinity and affinity distribution for VHH-Fc variants. VHH-Fc demonstrate a range of affinities for TIGIT, with a low end of 12 nM K_{D} and a high end of 1685 nM K_{D} (data not shown). Table 5A provides specific values for the VHH-Fc clones for ELISA, Protein A (mg/ml), and K_{D} (nM). FIG. 7A and FIG. 7B depict TIGIT affinity distribution for the VHH libraries, over the 20- 4000 affinity threshold (FIG. 7A; monovalent KD) and the 20- 1000 affinity threshold (FIG. 7B; monovalent KD). Out of the 140 VHH binders tested, 51 variants had affinity <100 nM, and 90 variants had affinity <200 nM. FIG. 8 shows data of CDR3 counts per length for the ‘VHH ratio’ library, the ‘VHH shuffle library,’ and the ‘VHH hShuffle library.’ Table 5B shows number of TIGIT unique clones and TIGIT binders for the ‘VHH ratio’ library, the NM shuffle library,' and the ‘VHH hShuffle library.’

TABLE 5A

| | | | ProA | K_{D} |
|---|---|---|---|---|
| Clone | ELISA | Library | (mg/m1) | (nM) |
| 31-1 | 5.7 | VHH hShuffle | 0.29 | 12 |
| 31-6 | 9.6 | VHH hShuffle | 0.29 | 14 |
| 31-26 | 5.1 | VHH hShuffle | 0.31 | 19 |
| 30-30 | 8.0 | VHH Shuffle | 0.11 | 23 |
| 31-32 | 8.0 | VHH hShuffle | 0.25 | 27 |
| 29-10 | 5.0 | VHH Ratio | 0.19 | 32 |
| 29-7 | 7.3 | VHH Ratio | 0.28 | 41 |
| 30-43 | 13.5 | VHH Shuffle | 0.18 | 44 |
| 31-8 | 12.7 | VHH hShuffle | 0.29 | 45 |
| 31-56 | 11.7 | VHH hShuffle | 0.26 | 46 |
| 30-52 | 4.2 | VHH Shuffle | 0.22 | 49 |
| 31-47 | 8.8 | VHH hShuffle | 0.23 | 53 |
| 30-15 | 9.3 | VHH Shuffle | 0.26 | 55 |
| 30-54 | 5.5 | VHH Shuffle | 0.30 | 58 |
| 30-49 | 10.3 | VHH Shuffle | 0.26 | 62 |
| 29-22 | 3.4 | VHH Ratio | 0.27 | 65 |
| 29-30 | 9.2 | VHH Ratio | 0.28 | 65 |
| 31-35 | 5.7 | VHH hShuffle | 0.24 | 66 |
| 29-1 | 10.4 | VHH Ratio | 0.09 | 68 |
| 29-6 | 6.8 | VHH Ratio | 0.29 | 69 |
| 31-34 | 6.0 | VHH hShuffle | 0.32 | 70 |
| 29-12 | 6.2 | VHH Ratio | 0.23 | 70 |
| 30-1 | 5.4 | VHH Shuffle | 0.39 | 71 |
| 29-33 | 3.9 | VHH Ratio | 0.15 | 74 |
| 30-20 | 4.6 | VHH Shuffle | 0.19 | 74 |
| 31-20 | 6.6 | VHH hShuffle | 0.37 | 74 |
| 31-24 | 3.1 | VHH hShuffle | 0.15 | 75 |
| 30-14 | 9.9 | VHH Shuffle | 0.19 | 75 |
| 30-53 | 7.6 | VHH Shuffle | 0.24 | 78 |
| 31-39 | 9.9 | VHH hShuffle | 0.32 | 78 |
| 29-18 | 10.9 | VHH Ratio | 0.19 | 78 |
| 30-9 | 8.0 | VHH Shuffle | 0.40 | 79 |
| 29-34 | 8.6 | VHH Ratio | 0.21 | 80 |
| −29-27 | 8.6 | VHH Ratio | 0.18 | 82 |
| 29-20 | 5.9 | VHH Ratio | 0.26 | 83 |
| 30-55 | 6.0 | VHH Shuffle | 0.41 | 85 |
| 30-39 | 6.1 | VHH Shuffle | 0.07 | 88 |
| 31-15 | 6.2 | VHH hShuffle | 0.32 | 88 |
| 29-21 | 4.3 | VHH Ratio | 0.23 | 88 |
| 29-37 | 5.3 | VHH Ratio | 0.26 | 89 |
| 29-40 | 6.6 | VHH Ratio | 0.31 | 90 |
| 31-30 | 3.2 | VHH hShuffle | 0.33 | 93 |
| 31-10 | 12.3 | VHH hShuffle | 0.31 | 94 |
| 29-3 | 13.6 | VHH Ratio | 0.11 | 94 |
| 30-57 | 5.2 | VHH Shuffle | 0.24 | 95 |
| 29-31 | 4.4 | VHH Ratio | 0.18 | 96 |
| 31-27 | 8.1 | VHH hShuffle | 0.31 | 96 |
| 31-33 | 6.0 | VHH hShuffle | 0.32 | 96 |
| 30-40 | 7.1 | VHH Shuffle | 0.21 | 99 |
| 31-18 | 4.1 | VHH hShuffle | 0.36 | 99 |
| 30-5 | 9.3 | VHH Shuffle | 0.05 | 100 |

TABLE 5B
TIGIT unique clones and TIGIT binders

| Library | Unique Phage | VHH-Fc binders |
|---|---|---|
| VHH Ratio | 47 | 36 |
| VHH Shuffle | 58 | 45 |
| VHH hShuffle | 56 | 53 |

[0166] Thermostability and competition analysis of the VHH-Fc TIGIT clones is seen in FIG. 9 and Table 6. For the competition assays, 4 ug/mL TIGIT was immobilized and incubated with 0.05-100 nM VHH-Fc followed by incubation with 2 ug/mL biotin-CD155 and 1:5000 streptavidin-HRP.

TABLE 6
Thermostability of VHH-Fc TIGIT clones

| | | K_{D} | | | IC50 |
|---|---|---|---|---|---|
| Variant | Library | (nM) | Tₘ₁ | Tₘ₂ | (nM) |
| TIGIT-29-10 | Ratio | 32 | 72 | 87 | 17.65 |
| TIGIT-29-7 | Ratio | 41 | 82 | 90 | 9.24 |
| TIGIT-30-30 | Shuffle | 23 | 76 | 87 | 5.67 |
| TIGIT-30-43 | Shuffle | 44 | 82 | 90 | 2.32 |
| TIGIT-31-1 | hShuffle | 12 | 79 | 89 | 17.89 |
| TIGIT-31-6 | hShuffle | 14 | 77 | 87 | 4.00 |
| TIGIT-31-26 | hShuffle | 19 | 79 | 89 | 8.20 |
| TIGIT-31-32 | hShuffle | 27 | 80 | 86 | 2.85 |
| TIGIT-31-8 | hShuffle | 45 | 76 | 84 | 3.92 |
| TIGIT-31-56 | hShuffle | 46 | 74 | 83 | 1.52 |

### Example 5. Hyperimmune Immunoglobulin Library

[0167] A hyperimmune immunoglobulin (IgG) library was created using similar methods as described in Example 4. Briefly, the hyperimmune IgG library was generated from analysis of databases of human naive and memory B-cell receptor sequences consisting of more than 37 million unique IgH sequences from each of 3 healthy donors. More than two million CDRH3 sequences were gathered from the analysis and individually constructed using methods similar to Examples 1-3. Any duplicate CDRH3′s and potential liability motifs that frequently pose problems in development were removed during the library synthesis step including unpaired C- and N-glycosylation, deamination, and hydrolysis sites. These CDRH3 sequence diversities were then combinatorially assembled and incorporated onto the DP47 human framework to construct a highly functional antibody Fab library with 1×10¹⁰ size. A schematic of the design can be seen in FIG. 10.

[0168] The heavy chain CDR length distribution of the hyperimmune antibody libraries were assessed by next generation sequencing (NGS). The data of CDR length distribution is shown in FIGS. 11A-11B. Generally, selection of soluble protein targets undergo five rounds of selection involving a PBST wash three times in Round 1, a PBST wash five times in Round 2, a PBST wash seven times in Round 3, a PBST wash nine times in Round 4, and a PBST wash twelve times in Round 5. A non-fat milk block was used. See FIG. 12.

[0169] For human TIGIT (hTIGIT), 1 uM biotinylated antigen was mixed with 300 ul Dynabead M-280 at 10 mg/mL to generate a concentration of 100 pmol per 100 ul. The details of the various rounds of selection are seen in Table 7.

TABLE 7
Protein panning selection

| | | | |
|---|---|---|---|
| Round | Washes | Antigen Amount | Concentration |

Manual

| | | | | | |
|---|---|---|---|---|---|
| 1 | 3 | 100 | pmol | 1 | uM |
| 2 | 6 | 20 | pmol | 200 | nM |
| 3 | 9 | 10 | pmol | 100 | nM |
| 4 | 12 | 5 | pmol | 50 | nM |
| 5 | 12 | 5 | pmol | 50 | nM |

Kingfisher (KF)

| | | | | | |
|---|---|---|---|---|---|
| 1 | 2 | 100 | pmol | 1 | uM |
| 2 | 4 | 20 | pmol | 200 | nM |
| 3 | 6 | 10 | pmol | 100 | nM |
| 4 | 8 | 5 | pmol | 50 | nM |
| 5 | 8 | 5 | pmol | 50 | nM |

[0170] After various rounds of selection, hTIGIT IgGs were analyzed. Data is seen in FIGS. 13A-13F and Table 8. FIGS. 13A-13D show ELISA data from Round 3 and Round 4. FIGS. 13E-13F show data of CDRH3 length, yield (ug), and K_{D} (nM) for the hTIGIT IgGs analyzed.

TABLE 8
Protein panning data

| | | | | KF | | |
|---|---|---|---|---|---|---|
| Round | Target | Antigen | Washes | Washes | Titer | KF liter |
| 1 | hTIGIT | 100 pmol | 3 | — | 4.40E+06 | — |
| 2 | hTIGIT | 50 pmol | 5 | 4 | 4.40E+07 | 6.80E+06 |
| 3 | hTIGIT | 20 pmol | 7 | 4 | 6.00E+08 | 2.80E+09 |
| 4 | hTIGIT | 10 pmol | 9 | 5 | 5.00E+08 | 6.00E+08 |
| 5 | hTIGIT | 10 pmol | — | — | — | — |

[0171] Seventeen non-identical hTIGIT immunoglobulins were identified with monovalent affinity ranging from 16 nM to over 300 nM. Most of these immunoglobulins expressed well and produced over 20 ug purified protein at 1 ml expression volume.

### Example 6. Natural Antibody Library

[0172] An antibody library of TIGIT variant immunoglobulins was generated and assessed for pharmacokinetic characteristics.

[0173] Data is seen in Tables 9A-9B from the Carterra SPR system used to assess binding affinity and affinity distribution for the TIGIT variant immunoglobulins. Flow cytometry data for the TIGIT variant immunoglobulins can be found in FIG. 14A-AA.

| | | VHH-Fc | | | | | | VHH-V5-His SPR (8-22-19) | | | | |
|---|---|---|---|---|---|---|---|---|---|---|---|---|
| | | IgG | ka | | | VHH-V5-His | | | | | | TIGIT:CD155 |
| | | yield | (M−1 | kd | K_{D} | ProA | | | | | | Blockade |
| Variant | ELISA | (mg/ml) | s−1) | (s−1) | (nM) | (mg/ml) | Tm | ka | kd | kD | RU | IC50 (nM) |
| TIGIT-29-01 | 10.4 | 0.09 | 1.0E+09 | 6.8E+01 | 68 | 0.74 | 55.9 | 3E+04 | 1E−02 | 365 | 88 | |
| TIGIT-29-02 | 4.1 | 0.24 | 4.2E+07 | 8.5E+00 | 204 | 0.36 | 57.9 | | | | | |
| TIGIT-29-03 | 13.6 | 0.11 | 1.2E+06 | 1.1E−01 | 94 | 0.77 | 63.3 | | | | | |
| TIGIT-29-4 | 7.7 | 0.21 | 1.9E+08 | 2.0E+01 | 109 | | | | | | | |
| TIGIT-29-5 | 3.1 | 0.10 | 2.0E+05 | 3.4E−01 | 1681 | | | | | | | |
| TIGIT-29-06 | 6.8 | 0.29 | 9.9E+04 | 6.8E−03 | 69 | 0.56 | 73.1 | 5E+01 | 2E−02 | 432954 | 26131 | |
| TIGIT-29-07 | 7.3 | 0.28 | 1.1E+05 | 4.7E−03 | 41 | 0.41 | 55.7 | 8E+03 | 4E−03 | 465 | 26 | 9.2 |
| TIGIT-29-8 | 3.1 | 0.19 | 1.8E+05 | 2.7E−01 | 1458 | | | | | | | |
| TIGIT-29-9 | 6.0 | 0.19 | 1.0E+09 | 1.8E+02 | 176 | | | | | | | |
| TIGIT-29-10 | 5.0 | 0.19 | 1.5E+05 | 4.9E−03 | 32 | 0.74 | 55.9 | 1E+04 | 3E−03 | 323 | 36 | 17.7 |
| TIGIT-29-11 | 10.4 | 0.20 | 4.3E+08 | 4.4E+01 | 103 | | | | | | | |
| TIGIT-29-12 | 6.2 | 0.23 | 1.0E+09 | 7.0E+01 | 70 | 0.49 | 55.8 | 1E+04 | 1E−01 | 8579 | 464 | |
| TIGIT-29-13 | 4.8 | 0.14 | 1.0E+09 | 2.2E+02 | 221 | | | | | | | |
| TIGIT-29-14 | 5.2 | 0.15 | 2.5E+05 | 5.7E−02 | 231 | | | | | | | |
| TIGIT-29-15 | 9.3 | 0.20 | 1.0E+09 | 1.5E+02 | 145 | | | | | | | |
| TIGIT-29-16 | 4.2 | 0.32 | 2.1E+08 | 5.3E+01 | 246 | | | | | | | |
| TIGIT-29-17 | 3.2 | 0.21 | | | | | | | | | | |
| TIGIT-29-18 | 10.9 | 0.19 | 6.4E+05 | 5.0E−02 | 78 | 0.90 | 69.0 | 2E+04 | 7E−03 | 352 | 157 | |
| TIGIT-29-19 | 9.0 | 0.20 | | | | | | | | | | |
| TIGIT-29-20 | 5.9 | 0.26 | 1.0E+09 | 8.3E+01 | 83 | | | | | | | |
| TIGIT-29-21 | 4.3 | 0.23 | 2.8E+04 | 2.4E−03 | 88 | | | | | | | |
| TIGIT-29-22 | 3.4 | 0.27 | 2.9E+05 | 1.9E−02 | 65 | 0.36 | 57.9 | 6E+03 | 3E−03 | 500 | 123 | |
| TIGIT-29-23 | 4.7 | 0.29 | 8.9E+08 | 6.7E+02 | 759 | | | | | | | |
| TIGIT-29-24 | 3.2 | 0.28 | 5.0E+05 | 4.1E−01 | 822 | | | | | | | |
| TIGIT-29-25 | 6.3 | 0.14 | 3.0E+08 | 4.2E+01 | 138 | | | | | | | |
| TIGIT-29-26 | 11.4 | 0.14 | 8.2E+08 | 8.7E+01 | 105 | | | | | | | |
| TIGIT-29-27 | 8.6 | 0.18 | 1.3E+05 | 1.1E−02 | 82 | | | | | | | |
| TIGIT-29-28 | 3.6 | 0.24 | 2.7E+08 | 9.4E+01 | 352 | | | | | | | |
| TIGIT-29-29 | 11.1 | 0.24 | 1.0E+09 | 1.1E+02 | 108 | | | | | | | |
| TIGIT-29-30 | 9.2 | 0.28 | 1.5E+06 | 9.6E−02 | 65 | 0.77 | 63.3 | 3E+05 | 8E−02 | 232 | 77 | |
| TIGIT-29-31 | 4.4 | 0.18 | 9.5E+04 | 9.0E−03 | 96 | | | | | | | |
| TIGIT-29-32 | 3.7 | 0.32 | | | | | | | | | | |
| TIGIT-29-33 | 3.9 | 0.15 | 1.0E+09 | 7.4E+01 | 74 | 0.47 | 55.3 | 2E+04 | 4E−02 | 1519 | 202 | |
| TIGIT-29-34 | 8.6 | 0.21 | 1.6E+08 | 1.3E+01 | 80 | 0.74 | 67.0 | 3E+04 | 3E−02 | 967 | 167 | |
| TIGIT-29-35 | 3.1 | 0.17 | 4.9E+02 | 2.0E−02 | | | | | | | | |
| TIGIT-29-36 | 3.5 | 0.19 | 8.6E+08 | 1.4E+02 | 165 | | | | | | | |
| TIGIT-29-37 | 5.3 | 0.26 | 1.0E+09 | 8.9E+01 | 89 | | | | | | | |
| TIGIT-29-38 | 3.4 | 0.22 | | | | | | | | | | |
| TIGIT-29-39 | 3.4 | 0.26 | 2.0E+08 | 6.4E+01 | 314 | | | | | | | |
| TIGIT-29-40 | 6.6 | 0.31 | 7.6E+08 | 6.9E+01 | 90 | | | | | | | |
| TIGIT-29-41 | 7.7 | 0.13 | | | | | | | | | | |
| TIGIT-29-42 | 10.0 | 0.11 | 5.8E+08 | 6.6E+01 | 114 | | | | | | | |
| TIGIT-29-43 | 4.8 | 0.18 | | | | | | | | | | |
| TIGIT-29-44 | 7.4 | 0.16 | 7.3E+08 | 1.3E+02 | 183 | | | | | | | |
| TIGIT-29-45 | 10.6 | 0.09 | 5.7E+05 | 6.8E−02 | 119 | | | | | | | |
| TIGIT-29-46 | 7.4 | 0.26 | 9.4E+05 | 2.3E−01 | 250 | | | | | | | |
| TIGIT-29-47 | 4.9 | 0.28 | 5.2E+07 | 1.6E+01 | 304 | | | | | | | |
| TIGIT-30-01 | 5.4 | 0.39 | 1.4E+06 | 1.0E−01 | 71 | 0.63 | 54.5 | 1E+04 | 8E−02 | 7464 | 664 | |
| TIGIT-30-02 | 6.4 | 0.19 | 1.8E+08 | 8.9E+01 | 496 | 0.52 | 68.9 | | | | | |
| TIGIT-30-03 | 4.3 | 0.08 | 1.0E+09 | 2.7E+02 | 273 | 0.04 | 60.0 | | | | | |
| TIGIT-30-04 | 4.7 | 0.17 | 6.2E+08 | 1.5E+02 | 240 | 0.69 | 57.1 | | | | | |
| TIGIT-30-5 | 9.3 | 0.05 | 1.0E+09 | 1.0E+02 | 100 | 0.49 | 65.6 | | | | | |
| TIGIT-30-6 | 3.8 | 0.16 | 1.5E+04 | 8.7E−03 | 567 | | | | | | | |
| TIGIT-30-7 | 3.1 | 0.20 | 3.5E+05 | 9.9E−02 | 285 | | | | | | | |
| TIGIT-30-8 | 6.2 | 0.31 | 3.3E+05 | 6.9E−02 | 209 | | | | | | | |
| TIGIT-30-9 | 8.0 | 0.40 | 1.3E+05 | 1.1E−02 | 79 | | | | | | | |
| TIGIT-30-10 | 4.2 | 0.10 | 1.2E+05 | 3.9E−02 | 336 | | | | | | | |
| TIGIT-30-11 | 7.2 | 0.11 | 2.5E+05 | 5.6E−02 | 221 | | | | | | | |
| TIGIT-30-12 | 3.8 | 0.03 | 1.6E+07 | 5.7E+00 | 350 | | | | | | | |
| TIGIT-30-13 | 3.2 | 0.28 | 7.7E+08 | 8.2E+01 | 106 | | | | | | | |
| TIGIT-30-14 | 9.9 | 0.19 | 1.4E+05 | 1.0E−02 | 75 | | | | | | | |
| TIGIT-30-15 | 9.3 | 0.26 | 1.3E+05 | 7.0E−03 | 55 | 0.63 | 54.5 | 2E+04 | 4E−03 | 215 | 66 | |
| TIGIT-30-16 | 7.9 | 0.21 | 4.8E+05 | 5.6E−02 | 116 | | | | | | | |
| TIGIT-30-17 | 6.7 | 0.30 | 4.3E+08 | 1.3E+02 | 311 | | | | | | | |
| TIGIT-30-18 | 4.1 | 0.06 | 9.2E+04 | 6.8E−02 | 741 | | | | | | | |
| TIGIT-30-19 | 6.4 | 0.18 | 1.9E+08 | 7.9E+01 | 417 | | | | | | | |
| TIGIT-30-20 | 4.6 | 0.19 | 1.9E+06 | 1.4E−01 | 74 | 0.52 | 68.9 | 1E+04 | 2E−03 | 195 | 69 | |
| TIGIT-30-21 | 3.3 | 0.14 | 3.3E+07 | 1.3E+01 | 413 | | | | | | | |
| TIGIT-30-22 | 7.6 | 0.20 | 4.5E+04 | 3.7E−02 | 811 | | | | | | | |
| TIGIT-30-23 | 4.1 | 0.36 | 4.4E+02 | 2.9E−01 | | | | | | | | |
| TIGIT-30-24 | 5.3 | 0.26 | 5.7E+08 | 7.6E+01 | 133 | | | | | | | |
| TIGIT-30-25 | 9.3 | 0.05 | 3.4E+04 | 4.0E−03 | 117 | | | | | | | |
| TIGIT-30-26 | 6.1 | 0.22 | 2.8E+04 | 9.9E−03 | 347 | | | | | | | |
| TIGIT-30-27 | 4.4 | 0.24 | 7.6E+05 | 1.1E−01 | 141 | | | | | | | |
| TIGIT-30-28 | 7.6 | 0.24 | 8.9E+08 | 1.3E+02 | 147 | | | | | | | |
| TIGIT-30-29 | 4.3 | 0.11 | 4.9E+05 | 7.3E−02 | 148 | | | | | | | |
| TIGIT-30-30 | 8.0 | 0.11 | 3.5E+05 | 8.0E−03 | 23 | 0.04 | 60.0 | 1E+04 | 6E−03 | 387 | 3 | 5.7 |
| TIGIT-30-31 | 3.8 | 0.28 | 1.0E+09 | 4.5E+02 | 450 | | | | | | | |
| TIGIT-30-32 | 6.0 | 0.23 | 2.9E+05 | 6.0E−02 | 207 | | | | | | | |
| TIGIT-30-33 | 3.8 | 0.30 | 1.2E+05 | 1.8E−01 | 1546 | | | | | | | |
| TIGIT-30-34 | 7.2 | 0.16 | 4.9E+08 | 6.4E+01 | 130 | | | | | | | |
| TIGIT-30-35 | 3.3 | #N/A | | | | | | | | | | |
| TIGIT-30-36 | 6.4 | 0.09 | 6.6E+05 | 1.2E−01 | 179 | | | | | | | |
| TIGIT-30-37 | 4.2 | 0.07 | 1.7E+05 | 4.1E−02 | 235 | | | | | | | |
| TIGIT-30-38 | 3.9 | 0.13 | 2.6E+08 | 9.2E+01 | 360 | | | | | | | |
| TIGIT-30-39 | 6.1 | 0.07 | 8.1E+04 | 7.1E−03 | 88 | | | | | | | |
| TIGIT-30-40 | 7.1 | 0.21 | 9.7E+04 | 9.6E−03 | 99 | 1.00 | 55.6 | 3E+04 | 6E−03 | 222 | 113 | |
| TIGIT-30-41 | 8.7 | 0.25 | 2.4E+08 | 7.4E+01 | 309 | | | | | | | |
| TIGIT-30-42 | 6.3 | 0.26 | | | | | | | | | | |
| TIGIT-30-43 | 13.5 | 0.18 | 2.9E+05 | 1.3E−02 | 44 | 0.69 | 57.1 | 7E+04 | 8E−03 | 107 | 407 | 2.3 |
| TIGIT-30-44 | 3.5 | 0.28 | 6.1E+08 | 3.6E+02 | 584 | | | | | | | |
| TIGIT-30-45 | 3.3 | 0.20 | 2.1E+06 | 1.5E+00 | 736 | | | | | | | |
| TIGIT-30-46 | 5.9 | 0.22 | 5.8E+08 | 1.2E+02 | 206 | | | | | | | |
| TIGIT-30-47 | 8.4 | 0.20 | 4.4E+04 | 1.9E−02 | 418 | | | | | | | |
| TIGIT-30-48 | 3.6 | 0.27 | | | | | | | | | | |
| TIGIT-30-49 | 10.3 | 0.26 | 3.0E+08 | 1.8E+01 | 62 | 0.49 | 72.5 | 9E+04 | 8E−02 | 945 | 99 | |
| TIGIT-30-50 | 5.6 | 0.25 | | | | | | | | | | |
| TIGIT-30-51 | 3.4 | 0.06 | 9.9E+08 | 8.9E+02 | 897 | | | | | | | |
| TIGIT-30-52 | 4.2 | 0.22 | 5.4E+06 | 2.7E−01 | 49 | 0.49 | 65.6 | 3E+04 | 1E−01 | 4245 | 270 | n.d. |
| TIGIT-30-53 | 7.6 | 0.24 | 5.3E+08 | 4.1E+01 | 78 | | | | | | | |
| TIGIT-30-54 | 5.5 | 0.30 | 2.4E+05 | 1.4E−02 | 58 | 0.60 | 71.7 | 3E+04 | 4E−02 | 1090 | 130 | |
| TIGIT-30-55 | 6.0 | 0.41 | 3.5E+04 | 3.0E−03 | 85 | | | | | | | |
| TIGIT-30-56 | 4.6 | 0.40 | 7.5E+08 | 1.6E+02 | 214 | | | | | | | |
| TIGIT-30-57 | 5.2 | 0.24 | 1.0E+09 | 9.5E+01 | 95 | | | | | | | |
| TIGIT-30-58 | 3.3 | 0.30 | 1.7E+07 | 1.8E+01 | 1051 | 1.04 | 55.8 | 1E+04 | 1E−02 | 1059 | 120 | |
| TIGIT-31-01 | 5.7 | 0.29 | 2.8E+05 | 3.5E−03 | 12 | 0.68 | 55.7 | 2E+04 | 4E−03 | 169 | 122 | 17.8 |
| TIGIT-31-02 | 8.4 | 0.40 | 2.5E+05 | 5.4E−02 | 216 | 0.73 | 61.2 | | | | | |
| TIGIT-31-03 | 9.5 | 0.34 | 2.6E+05 | 3.0E−02 | 116 | 0.95 | 56.0 | | | | | |
| TIGIT-31-04 | 3.2 | 0.36 | | | | 0.89 | 49.7 | | | | | |
| TIGIT-31-05 | 3.8 | 0.28 | | | | 0.40 | 63.5 | | | | | |
| TIGIT-31-06 | 9.6 | 0.29 | 2.4E+05 | 3.5E−03 | 14 | 0.76 | 62.9 | 2E+04 | 3E−03 | 145 | 107 | 4.0 |
| TIGIT-31-7 | 7.9 | 0.40 | 9.1E+04 | 2.5E−02 | 275 | | | | | | | |
| TIGIT-31-08 | 12.7 | 0.29 | 3.8E+05 | 1.7E−02 | 45 | 0.74 | 52.6 | 4E+04 | 9E−03 | 210 | 178 | 3.9 |
| TIGIT-31-9 | 9.7 | 0.26 | 1.9E+05 | 2.4E−02 | 131 | | | | | | | |
| TIGIT-31-10 | 12.3 | 0.31 | 1.3E+06 | 1.2E−01 | 94 | | | | | | | |
| TIGIT-31-11 | 4.5 | 0.34 | 3.6E+05 | 4.2E−02 | 118 | | | | | | | |
| TIGIT-31-12 | 5.3 | 0.16 | | | | | | | | | | |
| TIGIT-31-13 | 7.3 | 0.33 | 8.0E+04 | 3.3E−02 | 409 | | | | | | | |
| TIGIT-31-14 | 5.8 | 0.26 | 1.0E+05 | 1.1E−02 | 114 | | | | | | | |
| TIGIT-31-15 | 6.2 | 0.32 | 2.2E+07 | 2.0E+00 | 88 | | | | | | | |
| TIGIT-31-16 | 9.2 | 0.22 | 2.4E+05 | 3.7E−02 | 151 | | | | | | | |
| TIGIT-31-17 | 8.7 | 0.26 | 1.5E+05 | 2.5E−02 | 166 | | | | | | | |
| TIGIT-31-18 | 4.1 | 0.36 | 5.4E+06 | 5.4E−01 | 99 | | | | | | | |
| TIGIT-31-19 | 6.7 | 0.23 | 1.0E+09 | 1.3E+02 | 125 | | | | | | | |
| TIGIT-31-20 | 6.6 | 0.37 | 1.2E+05 | 9.2E−03 | 74 | 1.18 | 67.0 | 1E+04 | 4E−03 | 281 | 45 | |
| TIGIT-31-21 | 9.4 | 0.46 | 1.6E+05 | 2.0E−02 | 122 | | | | | | | |
| TIGIT-31-22 | 7.4 | 0.56 | 6.1E+01 | 2.8E−04 | 4617 | | | | | | | |
| TIGIT-31-23 | 6.6 | 0.30 | 3.8E+05 | 4.9E−02 | 127 | | | | | | | |
| TIGIT-31-24 | 3.1 | 0.15 | 8.8E+05 | 6.6E−02 | 75 | | | | | | | |
| TIGIT-31-25 | 6.2 | 0.31 | 5.6E+08 | 8.6E+01 | 154 | | | | | | | |
| TIGIT-31-26 | 5.1 | 0.31 | 1.9E+05 | 3.6E−03 | 19 | 0.73 | 61.2 | 2E+04 | 3E−03 | 158 | 59 | 8.2 |
| TIGIT-31-27 | 8.1 | 0.31 | 1.0E+09 | 9.6E+01 | 96 | | | | | | | |
| TIGIT-31-28 | 3.7 | 0.22 | 4.4E+05 | 1.0E−01 | 234 | | | | | | | |
| TIGIT-31-29 | 7.4 | 0.44 | 3.2E+02 | 5.4E−04 | 1685 | | | | | | | |
| TIGIT-31-30 | 3.2 | 0.33 | 1.0E+09 | 9.3E+01 | 93 | | | | | | | |
| TIGIT-31-31 | 6.7 | 0.30 | 5.2E+05 | 5.4E−02 | 104 | | | | | | | |
| TIGIT-31-32 | 8.0 | 0.25 | 5.6E+05 | 1.5E−02 | 27 | 0.95 | 56.0 | 6E+04 | 6E−03 | 102 | 145 | 2.9 |
| TIGIT-31-33 | 6.0 | 0.32 | 5.3E+05 | 5.1E−02 | 96 | | | | | | | |
| TIGIT-31-34 | 6.0 | 0.32 | 5.5E+04 | 3.9E−03 | 70 | 0.35 | 63.0 | 4E+02 | 2E−01 | 473248 | 25265 | |
| TIGIT-31-35 | 5.7 | 0.24 | 4.8E+05 | 3.2E−02 | 66 | 1.07 | 60.9 | 3E+04 | 1E−02 | 346 | 78 | |
| TIGIT-31-36 | 5.6 | 0.30 | 4.1E+05 | 4.1E−02 | 102 | | | | | | | |
| TIGIT-31-37 | 5.7 | 0.41 | | | | | | | | | | |
| TIGIT-31-38 | 4.8 | 0.25 | 3.6E+05 | 6.2E−02 | 172 | | | | | | | |
| TIGIT-31-39 | 9.9 | 0.32 | 1.0E+05 | 8.2E−03 | 78 | | | | | | | |
| TIGIT-31-40 | 9.4 | 0.07 | | | | | | | | | | |
| TIGIT-31-41 | 5.8 | 0.23 | 1.3E+06 | 1.0E+00 | 750 | | | | | | | |
| TIGIT-31-42 | 9.6 | 0.29 | 6.5E+08 | 2.4E+02 | 371 | | | | | | | |
| TIGIT-31-43 | 4.9 | 0.17 | | | | | | | | | | |
| TIGIT-31-44 | 9.2 | 0.33 | 3.5E+05 | 4.9E−02 | 140 | | | | | | | |
| TIGIT-31-45 | 8.6 | 0.37 | 1.5E+05 | 3.0E−02 | 193 | | | | | | | |
| TIGIT-31-46 | 7.6 | 0.22 | 2.1E+05 | 2.7E−02 | 132 | | | | | | | |
| TIGIT-31-47 | 8.8 | 0.23 | 1.1E+05 | 5.9E−03 | 53 | 0.89 | 49.7 | 2E+04 | 4E−03 | 186 | 119 | n.d. |
| TIGIT-31-48 | 3.3 | 0.25 | 1.1E+08 | 1.9E+01 | 175 | | | | | | | |
| TIGIT-31-49 | 7.3 | 0.03 | | | | | | | | | | |
| TIGIT-31-50 | 6.7 | 0.27 | 6.6E+04 | 3.6E−02 | 551 | | | | | | | |
| TIGIT-31-51 | 12.1 | 0.26 | 8.5E+04 | 6.7E−02 | 784 | | | | | | | |
| TIGIT-31-52 | 6.5 | 0.24 | 8.4E+08 | 2.6E+02 | 308 | | | | | | | |
| TIGIT-31-53 | 3.2 | 0.43 | | | | | | | | | | |
| TIGIT-31-54 | 9.0 | 0.29 | 1.7E+05 | 1.8E−02 | 107 | | | | | | | |
| TIGIT-31-55 | 7.9 | 0.35 | 2.1E+05 | 3.3E−02 | 154 | | | | | | | |
| TIGIT-31-56 | 11.7 | 0.26 | 4.6E+05 | 2.1E−02 | 46 | 0.40 | 63.5 | 3E+04 | 1E−02 | 382 | 301 | 1.5 |
| TIGIT-471-001 | | | 3.59E+05 | 2.20E−02 | 6.13E−08 | | | | | | 175.3 | 9.6 |
| TIGIT-471-009 | | | | | | | | | | | | |
| TIGIT-471-017 | | | | | | | | | | | | |
| TIGIT-471-025 | | | | | | | | | | | | |
| TIGIT-471-033 | | | | | | | | | | | | |
| TIGIT-471-041 | | | | | | | | | | | | |
| TIGIT-471-049 | | | | | | | | | | | | |
| TIGIT-471-005 | | | | | | | | | | | | |
| TIGIT-471-013 | | | | | | | | | | | | |
| TIGIT-471-021 | | | | | | | | | | | | |
| TIGIT-471-029 | | | | | | | | | | | | |
| TIGIT-471-037 | | | | | | | | | | | | |
| TIGIT-471-045 | | | | | | | | | | | | |
| TIGIT-471-002 | | | | | | | | | | | | |
| TIGIT-471-010 | | | | | | | | | | | | |
| TIGIT-471-018 | | | | | | | | | | | | |
| TIGIT-471-026 | | | | | | | | | | | | |
| TIGIT-471-034 | | | | | | | | | | | | |
| TIGIT-471-042 | | | | | | | | | | | | |
| TIGIT-471-006 | | | | | | | | | | | | |
| TIGIT-471-014 | | | | | | | | | | | | |
| TIGIT-471-022 | | | | | | | | | | | | |
| TIGIT-471-030 | | | | | | | | | | | | |
| TIGIT-471-038 | | | 2.21E+05 | 1.22E−02 | 5.54E−08 | | | | | | 78.0 | 5.9 |
| TIGIT-471-046 | | | | | | | | | | | | |
| TIGIT-471-003 | | | | | | | | | | | | |
| TIGIT-471-011 | | | 3.69E+04 | 2.69E−01 | 7.29E−06 | | | | | | 1077.7 | 14.4 |
| TIGIT-471-019 | | | 3.44E+05 | 5.65E−02 | 1.64E−07 | | | | | | 155.9 | 13.6 |
| TIGIT-471-027 | | | 1.54E+05 | 9.26E−03 | 6.00E−08 | | | | | | 57.5 | 13.5 |
| TIGIT-471-035 | | | 1.23E+05 | 4.84E−02 | 3.95E−07 | | | | | | 93.7 | 3.2 |
| TIGIT-471-043 | | | | | | | | | | | | |
| TIGIT-471-007 | | | | | | | | | | | | |
| TIGIT-471-015 | | | | | | | | | | | | |
| TIGIT-471-023 | | | | | | | | | | | | |
| TIGIT-471-031 | | | | | | | | | | | | |
| TIGIT-471-039 | | | | | | | | | | | | |
| TIGIT-471-047 | | | | | | | | | | | | |
| TIGIT-471-004 | | | | | | | | | | | | |
| TIGIT-471-012 | | | | | | | | | | | | |
| TIGIT-471-020 | | | | | | | | | | | | |
| TIGIT-471-028 | | | 8.31E+02 | 2.34E−01 | 2.82E−04 | | | | | | 35239.4 | 3.6 |
| TIGIT-471-036 | | | | | | | | | | | | |
| TIGIT-471-044 | | | | | | | | | | | | |
| TIGIT-471-008 | | | | | | | | | | | | |
| TIGIT-471-016 | | | | | | | | | | | | |
| TIGIT-471-024 | | | | | | | | | | | | |
| TIGIT-471-032 | | | | | | | | | | | | |
| TIGIT-471-040 | | | | | | | | | | | | |
| TIGIT-471-048 | | | 3.73E+05 | 1.92E−02 | 5.14E−08 | | | | | | 122.3 | 9.8 |

TABLE 9B

| | | SPR Kinetics | | |
|---|---|---|---|---|
| Variant | ELISA | ka (1/Ms) | kd (1/s) | KD (nM) |
| TIGIT-211-1 | 6.7 | | | |
| TIGIT-211-2 | 7.1 | | | |
| TIGIT-211-3 | 8.9 | | | |
| TIGIT-211-4 | 8.4 | | | |
| TIGIT-211-5 | 7.7 | | | |
| TIGIT-211-6 | 6.4 | | | |
| TIGIT-211-7 | 9.7 | | | |
| TIGIT-211-8 | 6.7 | | | |
| TIGIT-211-9 | 11.7 | | | |
| TIGIT-211-10 | 12.1 | | | |
| TIGIT-211-11 | 10.4 | | | |
| TIGIT-211-12 | 10.7 | | | |
| TIGIT-211-13 | 15.0 | 1.48E+06 | 3.26E−01 | 220.73 |
| TIGIT-211-14 | 6.9 | | | |
| TIGIT-211-15 | 11.3 | 2.36E+04 | 7.12E−03 | 301.49 |
| TIGIT-211-16 | 6.9 | | | |
| TIGIT-211-17 | 13.2 | 2.66E+05 | 1.26E−01 | 472.42 |
| TIGIT-211-18 | 9.7 | 3.11E+03 | 8.32E−04 | 267.70 |
| TIGIT-211-19 | 10.7 | | | |
| TIGIT-211-20 | 13.3 | | | |
| TIGIT-211-21 | 11.1 | | | |
| TIGIT-211-22 | 6.5 | | | |
| TIGIT-211-23 | 12.3 | | | |
| TIGIT-211-24 | 10.2 | | | |
| TIGIT-211-25 | 8.4 | | | |
| TIGIT-211-26 | 10.2 | | | |
| TIGIT-211-27 | 6.6 | | | |
| TIGIT-211-28 | 7.2 | 2.54E+04 | 1.60E−03 | 63.13 |
| TIGIT-211-29 | 6.8 | | | |
| TIGIT-211-30 | 8.0 | 3.05E+04 | 6.81E−02 | 2230.80 |
| TIGIT-211-31 | 7.0 | | | |
| TIGIT-211-32 | 8.6 | | | |
| TIGIT-211-33 | 7.1 | | | |
| TIGIT-211-34 | 8.2 | | | |
| TIGIT-211-35 | 8.8 | 6.71E+04 | 4.06E−02 | 605.31 |
| TIGIT-211-36 | 6.8 | | | |
| TIGIT-211-37 | 6.6 | | | |
| TIGIT-211-38 | 9.7 | | | |
| TIGIT-211-39 | 10.4 | | | |
| TIGIT-211-40 | 10.2 | 1.03E+05 | 4.05E−02 | 391.73 |
| TIGIT-211-41 | 9.6 | | | |
| TIGIT-211-42 | 8.0 | 9.74E+03 | 6.43E−04 | 66.06 |
| TIGIT-211-43 | 12.0 | 1.43E+03 | 1.17E−03 | 818.60 |
| TIGIT-211-44 | 8.4 | | | |
| TIGIT-211-45 | 8.8 | 1.19E+04 | 1.25E−03 | 104.78 |
| TIGIT-211-46 | 7.7 | | | |
| TIGIT-211-47 | 8.2 | | | |
| TIGIT-211-48 | 15.8 | | | |
| TIGIT-211-49 | 11.5 | | | |
| TIGIT-211-50 | 9.9 | | | |
| TIGIT-211-51 | 10.7 | 3.47E+05 | 3.35E−02 | 96.54 |
| TIGIT-211-52 | 8.6 | | | |
| TIGIT-211-53 | 6.8 | | | |
| TIGIT-211-54 | 8.7 | | | |
| TIGIT-211-55 | 7.9 | | | |
| TIGIT-211-56 | 10.6 | | | |
| TIGIT-211-57 | 12.4 | 3.08E+04 | 1.05E−01 | 3403.11 |
| TIGIT-211-58 | 7.2 | | | |
| TIGIT-211-59 | 6.8 | | | |
| TIGIT-211-60 | 9.7 | | | |
| TIGIT-211-61 | 11.7 | | | |
| TIGIT-211-62 | 8.8 | | | |
| TIGIT-211-63 | 7.9 | | | |
| TIGIT-211-64 | 9.1 | | | |
| TIGIT-211-65 | 9.0 | | | |
| TIGIT-211-66 | 7.8 | | | |
| TIGIT-211-67 | 6.8 | | | |
| TIGIT-211-68 | 10.1 | | | |
| TIGIT-211-69 | 7.9 | 2.04E+04 | 6.22E−02 | 3043.20 |
| TIGIT-211-77 | | 6.10E+04 | 4.17E−02 | 682.57 |
| TIGIT-211-93 | | 2.27E+04 | 2.81E−02 | 1240.31 |
| TIGIT-211-95 | | 2.13E+05 | 7.56E−02 | 354.74 |
| TIGIT-211-98 | | 1.71E+02 | 9.80E−02 | 574119.69 |
| TIGIT-211-116 | | 3.89E+02 | 1.05E−01 | 269379.61 |

### Example 7. Exemplary Sequences

[0174] Sequences for hTIGIT immunoglobulins are seen in Tables 10-15.

TABLE 10
TIGIT sequences
CDRH3

| SEQ ID | | |
|---|---|---|
| NO: | IgG | Amino Acid Sequence |
| 1 | TIGIT-55-01 | CARVAGSSGWAFDYW |
| 2 | TIGIT-55-02 | CATLRLYSSGGGIDYW |
| 3 | TIGIT-55-03 | CARIVGATTRTYYYYGMDVW |
| 4 | TIGIT-55-04 | CARVRNRASDIW |
| 5 | TIGIT-55-05 | CARAPYSSSSWFDYW |
| 6 | TIGIT-55-06 | CARNSYGPPRSFGMDVW |
| 7 | TIGIT-55-07 | CARTPYRSGWADYW |
| 8 | TIGIT-55-08 | CTRSWYYYYGMDVW |
| 9 | TIGIT-55-09 | CARGYGGYGYW |
| 10 | TIGIT-55-10 | CAKAGDYDYYFDYW |
| 11 | TIGIT-55-11 | CASVKRWGYYFNWW |
| 12 | TIGIT-55-12 | CARVRVGAYDAFDIW |
| 13 | TIGIT-55-13 | CARNSGWFMPFDYW |
| 14 | TIGIT-55-14 | CARRGSGWYIDSW |
| 15 | TIGIT-55-15 | CARREGDYMGPNWFDPW |
| 16 | TIGIT-55-16 | CASIRERRFDFW |
| 17 | TIGIT-55-17 | CARHSLTPYNFWSGYYSRSFDIW |

Variable Domain of Heavy Chain

| | | |
|---|---|---|
| 18 | TIGIT-55-01 | EVQLLESGGGLVQPGGSLRLSCAASGFTFGSYGMSWVRQAPGKGLEW |
| | | VSSISGSGSTTYYADSVKGRFTISRDNSKNTLYLQMNSLRAEDTAVYYC |
| | | ARVAGSSGWAFDYWGQGTLVTVSS |
| 19 | TIGIT-55-02 | EVQLLESGGGLVQPGGSLRLSCAASGLTFSNYAMTWVRQAPGKGLEW |
| | | VSGISRSGGSTYYADSVKGRFTISRDNSKNTLYLQMNSLRAEDTAVYYC |
| | | ATLRLYSSGGGIDYWGQGTLVTVSS |
| 20 | TIGIT-55-03 | EVQLLESGGGLVQPGGSLRLSCAASGFTFHNYAMTWVRQAPGKGLEW |
| | | VSAITGSGTSTYYADSVKGRFTISRDNSKNTLYLQMNSLRAEDTAVYYC |
| | | ARIVGATTRTYYYYGMDVWGQGTLVTVSS |
| 21 | TIGIT-55-04 | EVQLLESGGGLVQPGGSLRLSCAASGFRFGNYAMSWVRQAPGKGLEW |
| | | VSAITGSGGNTFYADSVKGRFTISRDNSKNTLYLQINSLRAEDTAVYYC |
| | | ARVRNRASDIWGQGTLVTVSS |
| 22 | TIGIT-55-05 | EVQLLESGGGLVQPGGSLRLSCAASGFVFSSYAMNWVRQAPGKGLEW |
| | | VSTVSGSGGTTYYADSVKGRFTISRDNSKNTLYLQMNSLRAEDTAVYY |
| | | CARAPYSSSSWFDYWGQGTLVTVSS |
| 23 | TIGIT-55-06 | EVQLLESGGGLVQPGGSLRLSCAASGFTFSRYTMNWVRQAPGKGLEW |
| | | VSGISGSGGGAYYADSVKGRFTISRDNSKNTLYLQMNSLRAEDTAVYY |
| | | CARNSYGPPRSFGMDVWGQGTLVTVSS |
| 24 | TIGIT-55-07 | EVQLLESGGGLVQPGGSLRLSCAASGFTFSSYGMTWVRQAPGKGLEW |
| | | VSAISGRGSSTYYADSVKGRFTISRDNSKNTLYLQMNSLRAEDTAVYYC |
| | | ARTPYRSGWADYWGQGTLVTVSS |
| 25 | TIGIT-55-08 | EVQLLESGGGLVQPGGSLRLSCAASGFMFSDYAMSWVRQAPGKGLEW |
| | | VSGISGSGGYTYYADSVKGRFTISRDNSKNTLYLQMNSLRAEDTAVYY |
| | | CTRSWYYYYGMDVWGQGTLVTVSS |
| 26 | TIGIT-55-09 | EVQLLESGGGLVQPGGSLRLSCAASGFAFRSYAMGWVRQAPGKGLEW |
| | | VSTISGGGGNTYYADSVKGRFTISRDNSKNTLYLQMNSLRAEDTAVYY |
| | | CARGYGGYGYWGQGTLVTVSS |
| 27 | TIGIT-55-10 | EVQLLESGGGLVQPGGSLRLSCAASGFTFSKSAMSWVRQAPGKGLEW |
| | | VSAISGSGGLTYYADSVKGRFTISRDNSKNTLYLQMNSLRAEDTAVYY |
| | | CAKAGDYDYYFDYWGQGTLVTVSS |
| 28 | TIGIT-55-11 | EVQLLESGGGLVQPGGSLRLSCAASGFTFTNYGMSWVRQAPGKGLEW |
| | | VSSISGSGSTTYYADSVKGRFTISRDNSKNTLYLQMNSLRAEDTAVYYC |
| | | ASVKRWGYYFNWWGQGTLVTVSS |
| 29 | TIGIT-55-12 | EVQLLESGGGLVQPGGSLRLSCAASGFTLSSYAMAWVRQAPGKGLEW |
| | | VSTLSGSGGSTYYADSVKGRFTISRDNSKNTLYLQMNSLRAEDTAVYY |
| | | CARVRVGAYDAFDIWGQGTLVTVSS |
| 30 | TIGIT-55-13 | EVQLLESGGGLVQPGGSLRLSCAASGFTFSTYGMNWVRQAPGKGLEW |
| | | VSTISGSGGSTYFADSVKGRFTISRDNSKNTLYLQMNSLRAEDTAVYYC |
| | | ARNSGWFMPFDYWGQGTLVTVSS |
| 31 | TIGIT-55-14 | EVQLLESGGGLVQPGGSLRLSCAASGFMFSRYAMSWVRQAPGKGLEW |
| | | VSSISGSGGTTYYADSVKGRFTISRDNSKNTLYLQMNSLRAEDTAVYYC |
| | | ARRGSGWYIDSWGQGTLVTVSS |
| 32 | TIGIT-55-15 | EVQLLESGGGLVQPGGSLRLSCAASGFTFSDYAMGWVRQAPGKGLEW |
| | | VSTISGSGSRTYYADSVKGRFTISRDNSKNTLYLQMNSLRAEDTAVYYC |
| | | ARREGDYMGPNWFDPWGQGTLVTVSS |
| 33 | TIGIT-55-16 | EVQLLESGGGLVQPGGSLRLSCAASGFAFSSYAMGWVRQAPGKGLEW |
| | | VSAITSSGGGTYYADSVKGRFTISRDNSKNTLYLQMNSLRAEDTAVYY |
| | | CASIRERRFDFWGQGTLVTVSS |
| 34 | TIGIT-55-17 | EVQLLESGGGLVQPGGSLRLSCAASGFTFSNHAMAWVRQAPGKGLEW |
| | | VSGISGSGGYTYYADSVKGRFTISRDNSKNTLYLQMNSLRAEDTAVYY |
| | | CARHSLTPYNFWSGYYSRSFDIWGQGTLVTVSS |
| 35 | TIGIT-29-7 | EVQLVESGGGLVQAGGSLRLSCAASGSIFSNYAMGWFRQAPGKEREFV |
| | | ATISRGGTRTNYADSVKGRFTISADNAKNTVYLQMNSLKPEDTAVYYC |
| | | AAAAWTIYAYNYWGQGTQVTVSS |
| 36 | TIGIT-29-10 | EVQLVESGGGLVQAGGSLRLSCAASGRTFSNYGMGWFRQAPGKEREF |
| | | VSGISGSGGRTSYADSVKGRFTISADNAKNTVYLQMNSLKPEDTAVYY |
| | | CAANLWYPVDRLNTGFNYWGQGTQVTVSS |
| 37 | TIGIT-30-30 | EVQLVESGGGLVQAGGSLRLSCAASGGTFSGRGMGWFRQAPGKEREW |
| | | VSSVYIFGGSTYYADSVKGRFTISADNAKNTVYLQMNSLKPEDTAVYY |
| | | CANSNKPKFDWGQGTQVTVSS |
| 38 | TIGIT-30-43 | EVQLVESGGGLVQAGGSLRLSCAASGFTFSTSWMGWFRQAPGKEREL |
| | | VAARNSGGNTNYADSVKGRFTISADNAKNTVYLQMNSLKPEDTAVYY |
| | | CAADVWYGSTWRNWGQGTQVTVSS |
| 39 | TIGIT-31-1 | EVQLVESGGGLVQPGGSLRLSCAASGFTFDRSWMGWFRQAPGKEREV |
| | | VASITSGGSTYYADSVKGRFTISADNSKNTAYLQMNSLKPEDTAVYYC |
| | | AADVWYGSTWRNWGQGTLVTVSS |
| 40 | TIGIT-31-6 | EVQLVESGGGLVQPGGSLRLSCAASGFTFSTSWMGWFRQAPGKERELV |
| | | ASITSGGSTYYADSVKGRFTISADNSKNTAYLQMNSLKPEDTAVYYCA |
| | | ADVWYGSTWRNWGQGTLVTVSS |
| 41 | TIGIT-31-8 | EVQLVESGGGLVQPGGSLRLSCAASGFTFSTSWMGWFRQAPGKERELV |
| | | AARNSGGNTNYADSVKGRFTISADNSKNTAYLQMNSLKPEDTAVYYC |
| | | AADVWYGSTWRNWGQGTLVTVSS |
| 42 | TIGIT-31-26 | EVQLVESGGGLVQPGGSLRLSCAASGFTFDRSWMGWFRQAPGKEREL |
| | | VAAITSGGSTYYADSVKGRFTISADNSKNTAYLQMNSLKPEDTAVYYC |
| | | AADVWYGSTWRNWGQGTLVTVSS |
| 43 | TIGIT-31-32 | EVQLVESGGGLVQPGGSLRLSCAASGFTFSTSWMGWFRQAPGKERELV |
| | | AAMTSGGGTNYADSVKGRFTISADNSKNTAYLQMNSLKPEDTAVYYC |
| | | AADVWYGSTWRNWGQGTLVTVSS |
| 44 | TIGIT-31-56 | EVQLVESGGGLVQPGGSLRLSCAASGRIFRRNSMGWFRQAPGKEREFV |
| | | AVITRSGGGEVTTYADSVKGRFTINADNSKNTAYLQMNSLKPEDTAVY |
| | | YCAMSSVTRGSSDWGQGTLVTVST |

Variable Domain of Light Chain

| | | |
|---|---|---|
| 45 | TIGIT-55-01 | DIQMTQSPSSLSASVGDRVTITCRASQAISNYLNWYQQKPGKAPKLLIY |
| | | AASRLQSGVPSRFSGSGSGTDFTLTISSLQPEDFATYYCQESYSTPFTFGG |
| | | GTKVEIK |
| 46 | TIGIT-55-02 | DIQMTQSPSSLSASVGDRVTITCRASQYISTYLNWYQQKPGKAPKLLIY |
| | | AASSLQGGVPSRFSGSGSGTDFTLTISSLQPEDFATYYCQQNYITPLTFG |
| | | GGTKVEIK |
| 47 | TIGIT-55-03 | DIQMTQSPSSLSASVGDRVTITCRASQYISSYLNWYQQKPGKAPKLLIY |
| | | GAFSLQSGVPSRFSGSGSGTDFTLTISSLQPEDFATYYCQQSYITPYTFGG |
| | | GTKVEIK |
| 48 | TIGIT-55-04 | DIQMTQSPSSLSASVGDRVTITCRASQTIITYLNWYQQKPGKAPKLLIYA |
| | | ASNLRSGVPSRFSGSGSGTDFTLTISSLQPEDFATYYCQQSYSLPWTFGG |
| | | GTKVEIK |
| 49 | TIGIT-55-05 | DIQMTQSPSSLSASVGDRVTITCRASQSVRSYLNWYQQKPGKAPKLLIY |
| | | TATSLESGVPSRFSGSGSGTDFTLTISSLQPEDFATYYCQQSYGLPRTFG |
| | | GGTKVEIK |
| 50 | TIGIT-55-06 | DIQMTQSPSSLSASVGDRVTITCRASQSISKYLNWYQQKPGKAPKLLIY |
| | | GASSLRGGVPSRFSGSGSGTDFTLTISSLQPEDFATYYCQQSYRPPLTFG |
| | | GGTKVEIK |
| 51 | TIGIT-55-07 | DIQMTQSPSSLSASVGDRVTITCRASQNIKTYLNWYQQKPGKAPKLLIY |
| | | AASSLHTGVPSRFSGSGSGTDFTLTISSLQPEDFATYYCQQTYSIPQTFGG |
| | | GTKVEIK |
| 52 | TIGIT-55-08 | DIQMTQSPSSLSASVGDRVTITCRAGQSIRSYLNWYQQKPGKAPKLLIY |
| | | ASSNLQSGVPSRFSGSGSGTDFTLTISSLQPEDFATYYCQQSYSTPLLTFG |
| | | GGTKVEIK |
| 53 | TIGIT-55-09 | DIQMTQSPSSLSASVGDRVTITCRASQSIRRYLNWYQQKPGKAPKLLIY |
| | | AASTLQIGVPSRFSGSGSGTDFTLTISSLQPEDFATYYCQQTYSSPYTFGG |
| | | GTKVEIK |
| 54 | TIGIT-55-10 | DIQMTQSPSSLSASVGDRVTITCRTSQSIRRYLNWYQQKPGKAPKLLIYR |
| | | ASRLQSGVPSRFSGSGSGTDFTLTISSLQPEDFATYYCQQSYNTLRTFGG |
| | | GTKVEIK |
| 55 | TIGIT-55-11 | DIQMTQSPSSLSASVGDRVTITCRASQNINYYLNWYQQKPGKAPKLLIY |
| | | GASSLQNGVPSRFSGSGSGTDFTLTISSLQPEDFATYYCQQSYITPYTGG |
| | | GTKVEIK |
| 56 | TIGIT-55-12 | DIQMTQSPYSLSASVGDRVTITCRASQSIRRYLNWYQQKPGKAPKLLIY |
| | | RASTLQTGVPSRFSGSGSGTDFTLTISSLQPEDFATYYCQQTYSSPFTFGG |
| | | GTKVEIK |
| 57 | TIGIT-55-13 | DIQMTQSPSSLSASVGDRVTITCRTSQSISTYLNWYQQKPGKAPKLLIYA |
| | | TSRLQSGVPSRFSGSGSGTDFTLTISSLQPEDFATYYCQQSYTTPLTFGG |
| | | GTKVEIK |
| 58 | TIGIT-55-14 | DIQMTQSPSSLSASVGDRVTITCRASQSVSRYLNWYQQKPGKAPKLLIY |
| | | GSSNLQSGVPSRFSGSGSGTDFTLTISSLQPEDFATYYCQESYSTPFTFGG |
| | | GTKVEIK |
| 59 | TIGIT-55-15 | DIQMTQSPSSLSASVGDRVTITCRASQAISRNLNWYQQKPGKAPKLLIY |
| | | GASNLQTGVPSRFSGSGSGTDFTLTISSLQPEDFATYYCQQSHSTPVTFG |
| | | GGTKVEIK |
| 60 | TIGIT-55-16 | DIQMTQSPSSLSASVGDRVTITCRASQRISTYLNWYQQKPGKAPKLLIY |
| | | GTSSLQSGVPSRFSGSGSGTDFTLTISSLQPEDFATYYCQQSYIIPWTFGG |
| | | GTKVEIK |
| 61 | TIGIT-55-17 | DIQMTQSPSSLSASVGDRVTITCRASQSISSYVNWYQQKPGKAPKLLIYG |
| | | ASRLQDGVPSRFSGSGSGTDFTLTISSLQPEDFATYYCQQSYITPYTFGG |
| | | GTKVEIK |

TABLE 11
Variable Domain of Heavy Chain CDR Sequences

| | SEQ | | SEQ | | SEQ | |
|---|---|---|---|---|---|---|
| | ID | | ID | | ID | |
| Variant | NO | CDR1 | NO | CDR2 | NO | CDR3 |
| TIGIT-29-01 | 62 | RTFSNYAMG | 360 | AAITWSGTRTDYA | 658 | CAAAAWTIYEYDYW |
| TIGIT-29-02 | 63 | RTFDIYAMG | 361 | STISWSGGRTYYA | 659 | CAARPVYRTYGSW |
| TIGIT-29-03 | 64 | FTFSSYAMG | 362 | AAITWSGTRTDYA | 660 | CAAAAWRYSEYDYW |
| TIGIT-29-4 | 65 | STFDTYVMG | 363 | STISSDGDSTYYA | 661 | CAAGTRRGRNYW |
| TIGIT-29-5 | 66 | RTFSIYAMG | 364 | ATISSSGDRTYYA | 662 | CAARRYGRRYDYW |
| TIGIT-29-06 | 67 | GTFRSYVMG | 365 | ATINSSGSRTYYA | 663 | CAARPNYRDYEYW |
| TIGIT-29-07 | 68 | SIFSNYAMG | 366 | ATISRGGTRTNYA | 664 | CAAAAWTIYAYNYW |
| TIGIT-29-8 | 69 | RTLDDYVMG | 367 | ATISGGGDTTYYA | 665 | CAAVPWRWTTRRDYW |
| TIGIT-29-9 | 70 | FTFDNYAMG | 368 | SSITWSGGRTSYA | 666 | CAANAWTIYRYDYW |
| TIGIT-29-10 | 71 | RTFSNYGMG | 369 | SGISGSGGRTSYA | 667 | CAANLWYPVDRLNTGFNYW |
| TIGIT-29-11 | 72 | RTLSSYAMG | 370 | ASITWGGGRTYYA | 668 | CATRLWGTWTAGDYDYW |
| TIGIT-29-12 | 73 | STFSSYAMG | 371 | AAITWSGTRTNYA | 669 | CAAAAWTIYTYDSW |
| TIGIT-29-13 | 74 | FIFSNYAMG | 372 | AAITWSGGRTYYA | 670 | CAAAAWTIYEYDYW |
| TIGIT-29-14 | 75 | FTFSDYVMG | 373 | SAISWSGTNTNYA | 671 | CATRALRDGRGYW |
| TIGIT-29-15 | 76 | RTFDSYAMG | 374 | ATISGSGGRTYYA | 672 | CAAAAWTIYEFDSW |
| TIGIT-29-16 | 77 | SIFSIYAMG | 375 | ATISWGGNSTYYA | 673 | CAARPRFRTYGYW |
| TIGIT-29-17 | 78 | STLSIYAMG | 376 | ATISSGGGSTYYA | 674 | CAAGSVYGRNYW |
| TIGIT-29-18 | 79 | STFSNYAMG | 377 | SAINSSGSRTYYA | 675 | CAARLWGTWTAGDYDYW |
| TIGIT-29-19 | 80 | RTFSSYAMG | 378 | ATISGSFGRTYYA | 676 | CAAGAWTIYEYDYW |
| TIGIT-29-20 | 81 | STFSIYAMG | 379 | ASISWSGDTTNYA | 677 | CAAGSVYGRNSW |
| TIGIT-29-21 | 82 | STFSNYAMG | 380 | SAITWSSSRTYYA | 678 | CAAAAWTIYNFEYW |
| TIGIT-29-22 | 83 | SILSSYTMG | 381 | STISRSSTRTYYA | 679 | CAARLWGTWTAGDYDYW |
| TIGIT-29-23 | 84 | STFDIYAMG | 382 | ASISSGDTNTNYA | 680 | CAAGRYSGYNSW |
| TIGIT-29-24 | 85 | RTFDTYAMG | 383 | SAISTGDGSTNYA | 681 | CAAARRSGRGSW |
| TIGIT-29-25 | 86 | FTFDNYAMG | 384 | AAITWSGGRTYYA | 682 | CAAAAWTIYEYDSW |
| TIGIT-29-26 | 87 | FTFDNYAMG | 385 | ATITWSGTRTNYA | 683 | CAAAAWTIYDYDYW |
| TIGIT-29-27 | 88 | RTFSNNVMG | 386 | AAISWGGASTNYA | 684 | CAAGPKTPDTRNYW |
| TIGIT-29-28 | 89 | FIFDSYAMG | 387 | AAISWGGSNTNYA | 685 | CAAVRITDGRDYW |
| TIGIT-29-29 | 90 | RTFSNYAMG | 388 | AAITWSGTRTDYA | 686 | CAAAAWTIYEYDYW |
| TIGIT-29-30 | 91 | FTFSSYAMG | 389 | AAITWSGTRTDYA | 687 | CAAAAWRYSEYDYW |
| TIGIT-29-31 | 92 | FTFSIYAMG | 390 | STISWSGGNTYYA | 688 | CATRPRFRRYDSW |
| TIGIT-29-32 | 93 | STFDSYAMG | 391 | AAITTSGSSTYYA | 689 | CAARGGVRSGSPGTYNYW |
| TIGIT-29-33 | 94 | FIFSTYAMG | 392 | SAITRSGITTYYA | 690 | CAAAAWTIYEYDYW |
| TIGIT-29-34 | 95 | FTFRNYAMG | 393 | SSISSSSSRTSYA | 691 | CAARLWGTWTAGDYDYW |
| TIGIT-29-35 | 96 | RIFSIYTMG | 394 | ATINSSGSRTYYA | 692 | CAARPSYNRYDSW |
| TIGIT-29-36 | 97 | FTFSSYAMG | 395 | ASITWSGTSTNYA | 693 | CAAAAWTIYAYDYW |
| TIGIT-29-37 | 98 | RTFSNYAMG | 396 | AGISWSGTRTYYA | 694 | CAAAAWTIYEYDYW |
| TIGIT-29-38 | 99 | STFSSYAMG | 397 | SAISRNGASTSYA | 695 | CAAAGTRFDYW |
| TIGIT-29-39 | 100 | RTLDDYVMG | 398 | ATISGGGDTTYYA | 696 | CAAVPWRWTTRRDYW |
| TIGIT-29-40 | 101 | FTFDNYAMG | 399 | ATITWSGTRTNYA | 697 | CAAAAWTIYDYDYW |
| TIGIT-29-41 | 102 | RTFSTNAMG | 400 | TAITTSGGNTYYA | 698 | CAARDETYGTYDYW |
| TIGIT-29-42 | 103 | STFSTYAMG | 401 | ATISTSSSRTYYA | 699 | CAARLWGTWTAGDYDYW |
| TIGIT-29-43 | 104 | RTFDSYAMG | 402 | SAISWSGSSTYYA | 700 | CAARGGYGRYDSW |
| TIGIT-29-44 | 105 | FTFDNYAMG | 403 | ATITWSGTTTNYA | 701 | CAAAAWTIYDYDYW |
| TIGIT-29-45 | 106 | FTFSSYAMG | 404 | ASITWSGTRTDYA | 702 | CAAAAWTIYGYEYW |
| TIGIT-29-46 | 107 | STFDIYAMG | 405 | ASISSGDTNTYYA | 703 | CAAGRYSGYNSW |
| TIGIT-29-47 | 108 | STLSSYAMG | 406 | AAITGSGGRTYYA | 704 | CAANRRYSFPYWSFWYDDFDYW |
| TIGIT-30-01 | 109 | FAFSSYWMG | 407 | AARNSGGNTNYA | 705 | CAADVWYGSTWRNW |
| TIGIT-30-02 | 110 | RTFGDYIMG | 408 | ATISGGGSTNYA | 706 | CAAVFSRGPLTW |
| TIGIT-30-03 | 111 | NIFSRYIMG | 409 | AGISNGGTTKYA | 707 | CAQGWKIRPTIW |
| TIGIT-30-04 | 112 | FTFSTHWMG | 410 | AARNSGGNTNYA | 708 | CAADVWYGSTWRNW |
| TIGIT-30-5 | 113 | GIFRNYGMG | 411 | AAISWSGVSTIYA | 709 | CASSPYGPLYRSTHYYDW |
| TIGIT-30-6 | 114 | RFSRINSMG | 412 | AHIFRSGITSYASYA | 710 | CAIGRGSW |
| TIGIT-30-7 | 115 | IPASIRTMG | 413 | SLITSDDGSTYYA | 711 | CAWTTNRGMDW |
| TIGIT-30-8 | 116 | FTMSSSWMG | 414 | ATLTSGGSTNYA | 712 | CAADVWYGSTWRNW |
| TIGIT-30-9 | 117 | PISGINRMG | 415 | STITFNGDHTYYA | 713 | CAARPYTRPGSMWVSSLYDW |
| TIGIT-30-10 | 118 | RTFSLSDMG | 416 | GAINWLSESTYYA | 714 | CAAQGGVLSGWDW |
| TIGIT-30-11 | 119 | SITSIRSMG | 417 | SSVYIFGGSTYYA | 715 | CANSNKPKFDW |
| TIGIT-30-12 | 120 | RTFGDYIMG | 418 | ASVSGGGNSDYA | 716 | CAAVFSRGPLTW |
| TIGIT-30-13 | 121 | RTFSNYFMG | 419 | AAINWDSARTYYA | 717 | CASAGRW |
| TIGIT-30-14 | 122 | PTFSIYDMG | 420 | AAITWNSGRTNYA | 718 | CAAGAWSSLRKTAASW |
| TIGIT-30-15 | 123 | FTFSGNWMG | 421 | SGISSGGGRTYYA | 719 | CAADVWYGSTWRNW |
| TIGIT-30-16 | 124 | FPFSEYPMG | 422 | AVVNWNGDSTYYA | 720 | CANFNRDW |
| TIGIT-30-17 | 125 | SIFNIGMG | 423 | SSIYSNGHTYYA | 721 | CANSNKPKFDW |
| TIGIT-30-18 | 126 | RAFSLRTMG | 424 | SLITSDDGSTYYA | 722 | CAWTTNRGMDW |
| TIGIT-30-19 | 127 | RTFSSYAMMG | 425 | AIITDGSKTLYA | 723 | CAAQFTLARHLVW |
| TIGIT-30-20 | 128 | PTFSIYDMG | 426 | AVINWSRGSTFYA | 724 | CAAGVWSSLRHTAANW |
| TIGIT-30-21 | 129 | FTFSTSWMG | 427 | ATINSGGGTNYA | 725 | CAADVWYGSTWRNW |
| TIGIT-30-22 | 130 | FTLSGNWMG | 428 | ASISSSGVSKHYA | 726 | CAADVWYGSTWRNW |
| TIGIT-30-23 | 131 | RAFRRYTMG | 429 | AAIRWSGGTTFYA | 727 | CAAEWAAMKDW |
| TIGIT-30-24 | 132 | NIFSRYIMG | 430 | AGISNGGTTKYA | 728 | CAQGWKIIPTDW |
| TIGIT-30-25 | 133 | PTFSIYDMG | 431 | ASTIWSRGDTYYA | 729 | CAAGVWSSLRHTAANW |
| TIGIT-30-26 | 134 | RTYYAMG | 432 | AIITDGSKTLYA | 730 | CAAQFTLARHLVW |
| TIGIT-30-27 | 135 | FTFSTSWMG | 433 | AGILSDGRELYA | 731 | CAADVWYGSTWRNW |
| TIGIT-30-28 | 136 | RTFESYRMG | 434 | GGINWSGRTYYA | 732 | CAARRLYSGSYLDW |
| TIGIT-30-29 | 137 | SSLSFNAMG | 435 | SSVYIFGGSTYYA | 733 | CANSNKPKFDW |
| TIGIT-30-30 | 138 | GTFSGRGMG | 436 | SSVYIFGGSTYYA | 734 | CANSNKPKFDW |
| TIGIT-30-31 | 139 | PTFSWTMMG | 437 | AIITDGSKTLYA | 735 | CAAQFTLARHLVW |
| TIGIT-30-32 | 140 | IIGTIRTMG | 438 | SLITSDDGSTYYA | 736 | CAWTTNRGMDW |
| TIGIT-30-33 | 141 | FTLENNMMG | 439 | SAIGWSGASTYYA | 737 | CAANLRGDNW |
| TIGIT-30-34 | 142 | NIFSRYIMG | 440 | AGISSGGTTKYA | 738 | CAQGWKIVPTNW |
| TIGIT-30-35 | 143 | NIDRLYAMG | 441 | SLITSDDGSTYYA | 739 | CASSGPADARNGERWAW |
| TIGIT-30-36 | 144 | SIASIHAIG | 442 | SSVYIFGGSTYYA | 740 | CANSNKPKFDW |
| TIGIT-30-37 | 145 | RTFSSKAMG | 443 | SSVYIFGGSTYYA | 741 | CANSNKPKFDW |
| TIGIT-30-38 | 146 | SIASFNAMG | 444 | SSVYIFGGSTYYA | 742 | CANSNKPKFDW |
| TIGIT-30-39 | 147 | FTFSTSWMG | 445 | VGISSGGSTHYA | 743 | CAADVWYGSTWRNW |
| TIGIT-30-40 | 148 | FTFSGNWMG | 446 | VGISSGGSTHYA | 744 | CAADVWYGSTWRNW |
| TIGIT-30-41 | 149 | RTFSSYAMMG | 447 | AIITDGSKTLYA | 745 | CAAQFILARHLVW |
| TIGIT-30-42 | 150 | ITITTEVMG | 448 | AAIHWNGDSTAYA | 746 | CAQVSQWRAW |
| TIGIT-30-43 | 151 | FTFSTSWMG | 449 | AARNSGGNTNYA | 747 | CAADVWYGSTWRNW |
| TIGIT-30-44 | 152 | VTLDLYAMG | 450 | AGIWRSGGSTVYA | 748 | CATWTTTWGRNRDW |
| TIGIT-30-45 | 153 | GTFSGGFMG | 451 | ASVLRGGYTWYA | 749 | CANGGSSYW |
| TIGIT-30-46 | 154 | RTFSTYASMW | 452 | AIITDGSKTLYA | 750 | CAGSWSYPGLTW |
| TIGIT-30-47 | 155 | FTMSSSWMG | 453 | VGISSGGSTHYA | 751 | CAADVWYGSTWRNW |
| TIGIT-30-48 | 156 | FPVNRYSMG | 454 | SAIGWSGASTYYA | 752 | CAADFWLARLRVADDYDW |
| TIGIT-30-49 | 157 | NIFSRYIMG | 455 | AGISNGGTTKYA | 753 | CAQGWKIVPTNW |
| TIGIT-30-50 | 158 | RSFSNYVMG | 456 | ATITSGGLTVYA | 754 | CALYRVNW |
| TIGIT-30-51 | 159 | SIFSISDMG | 457 | GAINWLSESTYYA | 755 | CAAQGGVLSGWDW |
| TIGIT-30-52 | 160 | RTFSNYFMG | 458 | ATVTWRDNITYYA | 756 | CASAGRW |
| TIGIT-30-53 | 161 | LTFSNYVMG | 459 | AAINWDSARTYYA | 757 | CASAGRW |
| TIGIT-30-54 | 162 | FTFRSFGMG | 460 | ASTIWSRGDTYYA | 758 | CASSPYGPLYRSTHYYDW |
| TIGIT-30-55 | 163 | NTFSGGFMG | 461 | ASVLRGGYTWYA | 759 | CATGWQSTTKSQGW |
| TIGIT-30-56 | 164 | LTISTYPMG | 462 | AAVNWSGRRELYA | 760 | CAAFREYHW |
| TIGIT-30-57 | 165 | PTFSIYDMG | 463 | AAITWNSGRIGYA | 761 | CAAGVWSSLRHTAANW |
| TIGIT-30-58 | 166 | FAFGDSWMG | 464 | SGISSGGGRTYYA | 762 | CAADVWYGSTWRNW |
| TIGIT-31-01 | 167 | FTFDRSWMG | 465 | ASITSGGSTYYA | 763 | CAADVWYGSTWRNW |
| TIGIT-31-02 | 168 | RTFGDYIMG | 466 | AEITRSGRTNYA | 764 | CAAVFSRGPLTW |
| TIGIT-31-03 | 169 | FTFSGNWMG | 467 | ASISSSGISTYYA | 765 | CAADVWYGSTWRNW |
| TIGIT-31-04 | 170 | FPVNRYWMG | 468 | ATITSGGSTNYA | 766 | CAADVWYGSTWRNW |
| TIGIT-31-05 | 171 | RTFGDYIMG | 469 | ATISRGGGSTYV | 767 | CAAVFSRGPLTW |
| TIGIT-31-06 | 172 | FTFSTSWMG | 470 | ASITSGGSTYYA | 768 | CAADVWYGSTWRNW |
| TIGIT-31-7 | 173 | STFSINRMG | 471 | ATIVHSGGHSGGTSYYA | 769 | CAARPYTRPGSMWVSSLYDW |
| TIGIT-31-08 | 174 | FTFSTSWMG | 472 | AARNSGGNTNYA | 770 | CAADVWYGSTWRNW |
| TIGIT-31-9 | 175 | GTLSGNAMG | 473 | ASIYWSSGNTYYA | 771 | CANSNKPKFDW |
| TIGIT-31-10 | 176 | HTFSSYGMG | 474 | AAISWSGISTIYA | 772 | CASSPYGPLYRSTHYYDW |
| TIGIT-31-11 | 177 | FTFSTSWMG | 475 | ASISTSGNTFYA | 773 | CAADVWYGSTWRNW |
| TIGIT-31-12 | 178 | FTFSRYWMG | 476 | ASITSGGSTYYA | 774 | CAADVWYGSTWRNW |
| TIGIT-31-13 | 179 | FTFDRSWMG | 477 | ASITSGGTTNYA | 775 | CAADVWYGSTWRNW |
| TIGIT-31-14 | 180 | YTFRAYVMG | 478 | AVINYRGSSLKYA | 776 | CAASEWGGSDYDHDYDW |
| TIGIT-31-15 | 181 | FTFSTYGMG | 479 | AAISWSGVSKHYA | 777 | CASSPYGPLYRSTHYYDW |
| TIGIT-31-16 | 182 | FTFSTSWMG | 480 | VSVTSGGYTNYA | 778 | CAADVWYGSTWRNW |
| TIGIT-31-17 | 183 | FTMSSSWMG | 481 | ASINSGGTRNYA | 779 | CAADVWYGSTWRNW |
| TIGIT-31-18 | 184 | FTFSGNWMG | 482 | ASISSGSAINYA | 780 | CAADVWYGSTWRNW |
| TIGIT-31-19 | 185 | RTFGNYAMG | 483 | ADIRSSAGRTYYA | 781 | CAASEWGGSDYDHDYDW |
| TIGIT-31-20 | 186 | FTFSGNWMG | 484 | AGILSDGRELYA | 782 | CAADVWYGSTWRNW |
| TIGIT-31-21 | 187 | FTLSGNWMG | 485 | ASISSSGISTYYA | 783 | CAADVWYGSTWRNW |
| TIGIT-31-22 | 188 | RTFSTHAMG | 486 | AAITPINWGGRGTHYA | 784 | CAAKRLRSGRWTW |
| TIGIT-31-23 | 189 | FTFSNSGMG | 487 | ASIYWSSGNTYYA | 785 | CANSNKPKFDW |
| TIGIT-31-24 | 190 | RTFSMG | 488 | ATVRWGTSSTYYA | 786 | CAAETFGSGSSLMSEYDW |
| TIGIT-31-25 | 191 | NIFSRYIMG | 489 | AGISNGGTTKYA | 787 | CAQGWKIVPTNW |
| TIGIT-31-26 | 192 | FTFDRSWMG | 490 | AAITSGGSTYYA | 788 | CAADVWYGSTWRNW |
| TIGIT-31-27 | 193 | FTFGHYAMG | 491 | AAISWSGVSTYYA | 789 | CASSPYGPLYRSTHYYDW |
| TIGIT-31-28 | 194 | RTFSSYHMG | 492 | ALISRVGVTSYA | 790 | CAAVRTYGSATYDW |
| TIGIT-31-29 | 195 | RSRMG | 493 | ATISWSGSAVYA | 791 | CAAGGRYSARVW |
| TIGIT-31-30 | 196 | RTYNMG | 494 | ATIYSRSGGSTTYYA | 792 | CATYGYDSGRYYSW |
| TIGIT-31-31 | 197 | FTLSGNWMG | 495 | ASISSGGGTNYA | 793 | CAADVWYGSTWRNW |
| TIGIT-31-32 | 198 | FTFSTSWMG | 496 | AAMTSGGGTNYA | 794 | CAADVWYGSTWRNW |
| TIGIT-31-33 | 199 | FTFSTSWMG | 497 | ASITSGGSTNYA | 795 | CAADVWYGSTWRNW |
| TIGIT-31-34 | 200 | RSRYGMG | 498 | SAISWSGISTYYA | 796 | CAATQWGSSGWKQARWYDW |
| TIGIT-31-35 | 201 | FTFSTSWMG | 499 | ASITSGGTTNYA | 797 | CAADVWYGSTWRNW |
| TIGIT-31-36 | 202 | FTFDRSWMG | 500 | ASVTSGGTTNYA | 798 | CAADVWYGSTWRNW |
| TIGIT-31-37 | 203 | SIFSINSMG | 501 | AALSWIIGSTYYA | 799 | CAVNGRWRSWSSQRDW |
| TIGIT-31-38 | 204 | FTFDRSWMG | 502 | ASITSGGSTSYA | 800 | CAADVWYGSTWRNW |
| TIGIT-31-39 | 205 | FTFSTSWMG | 503 | AGVNSNGYINYA | 801 | CAADVWYGSTWRNW |
| TIGIT-31-40 | 206 | STLRDYVMG | 504 | SSISRSGTTMFA | 802 | CAAVFSRGLLTC |
| TIGIT-31-41 | 207 | GTLSSYIMG | 505 | AAISGWSGGTTNYA | 803 | CAAARFAPGSRGYDW |
| TIGIT-31-42 | 208 | FTFSTHWMG | 506 | ASIGSSGIIRYA | 804 | CAADVWYGSTWRNW |
| TIGIT-31-43 | 209 | GTFSAFPMG | 507 | AAISSGGTTYYA | 805 | CAAQGGVLSAW |
| TIGIT-31-44 | 210 | FTFSGNWMG | 508 | ASISSGGTTNYA | 806 | CAADVWYGSTWRNW |
| TIGIT-31-45 | 211 | FTFSGNWMG | 509 | AGVNSNGYINYA | 807 | CAADVWYGSTWRNW |
| TIGIT-31-46 | 212 | FTFDRSWMG | 510 | ASITSGGTTSYA | 808 | CAADVWYGSTWRNW |
| TIGIT-31-47 | 213 | FTFSGNWMG | 511 | VGISSGGTPHYA | 809 | CAADVWYGSTWRNW |
| TIGIT-31-48 | 214 | FTLSSNWMG | 512 | AGVNSNGYINYA | 810 | CAADVWYGSTWRNW |
| TIGIT-31-49 | 215 | FDFSVSWMG | 513 | ARISSGGELPYYA | 811 | CAARPNTRPGSMW |
| TIGIT-31-50 | 216 | FTMSSSWMG | 514 | GGISSGGSTYYA | 812 | CAADVWYGSTWRNW |
| TIGIT-31-51 | 217 | RNFRRNSMG | 515 | AVITRSGGGEVTTYA | 813 | CAMSSVTRGSSDW |
| TIGIT-31-52 | 218 | FTFDRSWMG | 516 | AGITSSGIPNYA | 814 | CAADVWYGSTWRNW |
| TIGIT-31-53 | 219 | LTISTYNMG | 517 | SAIGWSGASTYYA | 815 | CAAFRGRMYDW |
| TIGIT-31-54 | 220 | FTFSTSWMG | 518 | AAVTSGGNTNYA | 816 | CAADVWYGSTWRNW |
| TIGIT-31-55 | 221 | RTFGDYIMG | 519 | AEITRVGNTNYA | 817 | CAAVFSRGPLTW |
| TIGIT-31-56 | 222 | RIFRRNSMG | 520 | AVITRSGGGEVTTYA | 818 | CAMSSVTRGSSDW |
| TIGIT-211-1 | 223 | FTFGNYGVA | 521 | SYICRAGGPTYYA | 819 | CARSWPYFFYCW |
| TIGIT-211-2 | 224 | FTFDKYRMM | 522 | GVIWGGGGTYYA | 820 | CARIFSYALDYW |
| TIGIT-211-3 | 225 | FTFPSYTMG | 523 | STIWPRGHKTYYA | 821 | CAKDQWPFDYW |
| TIGIT-211-4 | 226 | FTFSNYGVS | 524 | SGISSGGDTYYV | 822 | CAKYTGRWEPYDYW |
| TIGIT-211-5 | 227 | FTFNNFSMT | 525 | SSISPSGGWTEYA | 823 | CAKAFSTFDYW |
| TIGIT-211-6 | 228 | FTFSAYGMN | 526 | SGISPNGGITTYA | 824 | CASLSRGYW |
| TIGIT-211-7 | 229 | FTFSDYTMN | 527 | SSIDWHGGVTYYA | 825 | CARSYGGGFDYW |
| TIGIT-211-8 | 230 | FTFNNYGMS | 528 | TGISSGGDTYYV | 826 | CAKYTGRWEPYDYW |
| TIGIT-211-9 | 231 | FTFNKYPMM | 529 | SGITRSGSTNYR | 827 | CAKKLSNGFDYW |
| TIGIT-211-10 | 232 | FTFNSYAMS | 530 | SGIVSSGGLTGYA | 828 | CAKGWFGGFNYW |
| TIGIT-211-11 | 233 | FTFGNYKMT | 531 | SQISQTGRITYYA | 829 | CARSSFYYYALDYW |
| TIGIT-211-12 | 234 | FTFTNYGVS | 532 | SGISSGGDTYYV | 830 | CAKYTGRWEPYDYW |
| TIGIT-211-13 | 235 | FTFNKYPMM | 533 | SYISSSGSSTYYA | 831 | CARVIAAAGAFDYW |
| TIGIT-211-14 | 236 | FTFADEGMM | 534 | SSIGRHGGRTYYA | 832 | CAKSGRRFDYW |
| TIGIT-211-15 | 237 | FTFSSAAMS | 535 | SGISPSGGITTYA | 833 | CASLSRGYW |
| TIGIT-211-16 | 238 | FTFDRYRMM | 536 | SAISGSGDKTYYA | 834 | CAKKLSNGFDYW |
| TIGIT-211-17 | 239 | FTFAEYSMN | 537 | SWISPHGALTYYA | 835 | CARSYGGGFDYW |
| TIGIT-211-18 | 240 | FTFGTIPMS | 538 | GVIWGGGGTYYA | 836 | CAKAHGNPVSDLSFDYW |
| TIGIT-211-19 | 241 | FTFLYYRMA | 539 | TAISRSGDKTYYA | 837 | CAKWFSRNFDYC |
| TIGIT-211-20 | 242 | FTFTNYGVS | 540 | GYINPSGGYTYYA | 838 | CARSYGGGFDYW |
| TIGIT-211-21 | 243 | FTFSNYGVS | 541 | GYINPSRGYTYYA | 839 | CARSYGGGFDYW |
| TIGIT-211-22 | 244 | FTFEGYPMS | 542 | SSISGYGSTTYYA | 840 | CAKSSFDKYNFDYW |
| TIGIT-211-23 | 245 | FTFSRYFMG | 543 | SSISSTGFKTYYA | 841 | CARGGRLYDILTGQGAPFDYW |
| TIGIT-211-24 | 246 | FTFNNYGVS | 544 | TWISPHGALTYYA | 842 | CAKGRRRFDYW |
| TIGIT-211-25 | 247 | FTFGTIPMS | 545 | SVIHQSGTPTYYA | 843 | CARGPYGRYAALDYW |
| TIGIT-211-26 | 248 | FTFGNYRMT | 546 | SQISETGRRTYYA | 844 | CARSSFYYYALDYW |
| TIGIT-211-27 | 249 | FTFVWYGMG | 547 | SAISGRGDNSYYA | 845 | CAKAGPRGFDYW |
| TIGIT-211-28 | 250 | FTFSTYAMS | 548 | SEISPSGGYTYYA | 846 | CAKVKLGGGPNFDYW |
| TIGIT-211-29 | 251 | FTFSYYRMY | 549 | SGISPSGGITTYA | 847 | CAKGNSRYVFDYW |
| TIGIT-211-30 | 252 | FTFKSYGMH | 550 | SAISGSGGGTSYA | 848 | CARAGQWLGDFDYW |
| TIGIT-211-31 | 253 | FTFVAYNMG | 551 | SAISREGRATYYA | 849 | CAKSGTRIKQGFDYW |
| TIGIT-211-32 | 254 | FTFEQYDMR | 552 | SYITPKGDHTYYA | 850 | CAKDRIPNLHFDYW |
| TIGIT-211-33 | 255 | FTFNKYPMM | 553 | SAISGSGGGTSYA | 851 | CARGGYYYALDYW |
| TIGIT-211-34 | 256 | FTFSVYSMN | 554 | SGISPSGGITTYA | 852 | CAKIRNLHWDVGRQFDYW |
| TIGIT-211-35 | 257 | FTFNAYPMT | 555 | SAITGSGGSTYYA | 853 | CARDGSYSSSWYGYW |
| TIGIT-211-36 | 258 | FTFSNYGMT | 556 | GVIWGGGGTYYA | 854 | CAKHWNRFDYW |
| TIGIT-211-37 | 259 | FTFPVYNMA | 557 | SSISGYGSTTYYA | 855 | CARDAYLHFDYW |
| TIGIT-211-38 | 260 | FTFSPYLVS | 558 | SSISDHGFNTYYA | 856 | CAKSPLVRNNGQFDYW |
| TIGIT-211-39 | 261 | FTFKSYVMG | 559 | SAINGSGGGTYYA | 857 | CARGGSWEEDFDYW |
| TIGIT-211-40 | 262 | FTFSRYAMN | 560 | SEISPSGKKKYYA | 858 | CAKSSFDKYNFDYW |
| TIGIT-211-41 | 263 | FTFNKYPMM | 561 | SSIVSSGGLTLYA | 859 | CAKGGGLPYLSFDYW |
| TIGIT-211-42 | 264 | FTFNHYGMG | 562 | SYISSSGSSTYYA | 860 | CAKGWLGNFDYW |
| TIGIT-211-43 | 265 | FTFYDYTMD | 563 | SAISGSGGGTSYA | 861 | CARRHWPGGFDYW |
| TIGIT-211-44 | 266 | FTFGNYAMA | 564 | SSIGRHGGRTYYA | 862 | CARDTYLHFDYW |
| TIGIT-211-45 | 267 | FTFRRYVMG | 565 | SEISPSGGYTYYA | 863 | CAKRWTFNTAFDYW |
| TIGIT-211-46 | 268 | FTFSSYFMS | 566 | TTIGPNGTTTYYA | 864 | CAREWQHGPVAYW |
| TIGIT-211-47 | 269 | FMFSWYDMG | 567 | SQISNTGDRRYYA | 865 | CAKSPSSLLATYFDYW |
| TIGIT-211-48 | 270 | FTFTNYGMS | 568 | CGIYPNGGSTYYA | 866 | CARAGGGGFDYC |
| TIGIT-211-49 | 271 | FTFPNYGMS | 569 | GYINPTGGYTYYA | 867 | CARSYGGGFDYW |
| TIGIT-211-50 | 272 | FTFPNYGMA | 570 | SGIYPSGGSTLYA | 868 | CAKAYYGGFDYW |
| TIGIT-211-51 | 273 | FTFHKYGMA | 571 | STISSGGGYTYYP | 869 | CARDTYLHFDYW |
| TIGIT-211-52 | 274 | FTFSRYHMG | 572 | STISPYGPVTYYA | 870 | CARVWRNHLDYW |
| TIGIT-211-53 | 275 | STFTEYRMW | 573 | SGISPSGGITTYA | 871 | CARVWRNSLDYW |
| TIGIT-211-54 | 276 | FTFEDTEMD | 574 | SKIGPHGRLTYYA | 872 | CARAPRGYSYGYYYW |
| TIGIT-211-55 | 277 | FTFGSSAMS | 575 | SAISGGGSNKYYA | 873 | CAKSGRRFDYW |
| TIGIT-211-56 | 278 | FTFSTAAMT | 576 | SGISPTGGITTYA | 874 | CASLSRGYC |
| TIGIT-211-57 | 279 | LTFPNYGMG | 577 | SAISREGRATYYA | 875 | CARVIAAAGAFDYW |
| TIGIT-211-58 | 280 | FTFLWYDMG | 578 | SAISGRGDNTYYA | 876 | CAKAVPKGFDYW |
| TIGIT-211-59 | 281 | FTFSPYLMA | 579 | SSISAPGFTTYYA | 877 | CARSPLVHYNRGFQYC |
| TIGIT-211-60 | 282 | FTFSDYTMN | 580 | SGISPSGGITYYA | 878 | CAKQAPGEKWLARGRLDYW |
| TIGIT-211-61 | 283 | FTFSNYGVS | 581 | SYINPSGGYTYYA | 879 | CARSYGGGFDYW |
| TIGIT-211-62 | 284 | FTFYKYLMS | 582 | SAISGNGGSTFYA | 880 | CAKGTRTFDYW |
| TIGIT-211-63 | 285 | FTFSAYPMY | 583 | SSITSTGDQTYYA | 881 | CARVITPLDILTYW |
| TIGIT-211-64 | 286 | FTLADYTMN | 584 | TWITPSGGLTYYA | 882 | CARSYGGGFDYW |
| TIGIT-211-65 | 287 | FTFSYYGMY | 585 | SPITNAGDRPYYA | 883 | CARHGAGYFGWYNDCC |
| TIGIT-211-66 | 288 | FTFVWYDMG | 586 | SSIPSSGFNTYYA | 884 | CAKSSLPSGQGHFDYW |
| TIGIT-211-67 | 289 | FTFNKYPMM | 587 | SAITGSGGGTSYA | 885 | CARGGYYYALDYW |
| TIGIT-211-68 | 290 | FTFSSASMS | 588 | SGISPTGGITTYA | 886 | CANLSPGYW |
| TIGIT-211-69 | 291 | FTFGNYRMT | 589 | GVIWGGGGTYYA | 887 | CARIFSYALDYW |
| TIGIT-211-70 | 292 | FTFSSYFMS | 590 | GVIWGGGGTYYA | 888 | CPKGGTSFDYW |
| TIGIT-211-71 | 293 | FTFSTAAMS | 591 | SAISPRGGITTYA | 889 | CARLSRGYW |
| TIGIT-211-72 | 294 | FTFRSYTMG | 592 | SSIWPRGQKTYYA | 890 | CAKGFRLFPRTFDYW |
| TIGIT-211-73 | 295 | FTFGTYYMG | 593 | SSISSSGGYTGYA | 891 | CAKGFRLFPRTFDYW |
| TIGIT-211-74 | 296 | FTFSSYVMI | 594 | SGINRTGGVTSYA | 892 | CAKVASDRSVLYDYW |
| TIGIT-211-75 | 297 | FTFGTIPMS | 595 | SSIGPHGGKTYYA | 893 | CAKVRPFWGTFDYW |
| TIGIT-211-76 | 298 | FTFSYYRVY | 596 | SGISPSGGITTYA | 894 | CAKGNSRYVFDYW |
| TIGIT-211-77 | 299 | FTFGNYAMA | 597 | SSIWPSGGQTWYA | 895 | CAKGGTSFDYW |
| TIGIT-211-78 | 300 | FTFTNYGVS | 598 | GYINPNGGYTYYA | 896 | CARSYGGGFDYW |
| TIGIT-211-79 | 301 | FTFSNYGVS | 599 | SYISHGGGDTYYA | 897 | CARSGPYYFDYW |
| TIGIT-211-80 | 302 | FAFAAYDMG | 600 | SYITPKGDHTYYA | 898 | CAKSSFDKYNFDYW |
| TIGIT-211-81 | 303 | FTLSSYPMS | 601 | SAITREGRATYYA | 899 | CARDTYLHFDYW |
| TIGIT-211-82 | 304 | FTFTYYRMD | 602 | SIITPSGGITYYA | 900 | CAKGNSRYMFDYW |
| TIGIT-211-83 | 305 | FTFADEGMM | 603 | SLIPHTGNPTYYA | 901 | CATAESYKGYDYW |
| TIGIT-211-84 | 306 | FTFKDYGVN | 604 | RVIWGGGDTYYV | 902 | CAKYTGRWEPYDYW |
| TIGIT-211-85 | 307 | FTFSRYAMT | 605 | GVIWGGGNTTYY | 903 | CAKGGTRFDYW |
| TIGIT-211-86 | 308 | FTFSSYFMS | 606 | GVIWGGGGTYYA | 904 | CAKGGTSFDYW |
| TIGIT-211-87 | 309 | FTFNKYPMM | 607 | STISHGGEHTYYA | 905 | CAKKLSNGFDYW |
| TIGIT-211-88 | 310 | FTFSNYGMS | 608 | SSIVSSGGLTLYA | 906 | CAKVWRNHLDYW |
| TIGIT-211-89 | 311 | FTFSNYGVS | 609 | GYINPSRGNTYYA | 907 | CARSYRGGFDYW |
| TIGIT-211-90 | 312 | FIFSSAAMS | 610 | SAISGRGDNTYYA | 908 | CARVWRNHLDYW |
| TIGIT-211-91 | 313 | FTFSYYRMY | 611 | SAITGTGGETYYA | 909 | CARVIAAAGAFDYW |
| TIGIT-211-92 | 314 | FTFSRYFMG | 612 | TSISSTGFNTYYA | 910 | CARGGRLYDILTGQGAPFDYW |
| TIGIT-211-93 | 315 | FTFSRYFMG | 613 | SEISPSGKKKYYA | 911 | CAKSSFDKYNFDYW |
| TIGIT-211-94 | 316 | FTFSYYRMY | 614 | SGISPTGCITYYA | 912 | CAKGHSLCVFYYW |
| TIGIT-211-95 | 317 | FTFPKYGMA | 615 | STISSGGGYTYYP | 913 | CARDTYLHFDYW |
| TIGIT-211-96 | 318 | FTFKDYGMN | 616 | SEISPSGGYTYYA | 914 | CARGSYIIWSALDYW |
| TIGIT-211-97 | 319 | FTFNAYPMT | 617 | SAITGSGGSTYYA | 915 | CARVWRNHLDYW |
| TIGIT-211-98 | 320 | FTFETYAMS | 618 | SVISGSGGRPNYA | 916 | CAREGLWAFDYW |
| TIGIT-211-99 | 321 | FTFSPYPMM | 619 | SAITGTGGETYYA | 917 | CAKWSSRAFDYW |
| TIGIT-211-100 | 322 | FTFSTYPVS | 620 | SGISSGGDTYYV | 918 | CAKYTGRWEPYDYW |
| TIGIT-211-101 | 323 | FTFGNYAMS | 621 | SGISPSGGHTWYA | 919 | CAKGGTSYDYW |
| TIGIT-211-102 | 324 | FTFTYYRMY | 622 | SGISPSGGITTYA | 920 | CAKGNSRYVFDYW |
| TIGIT-211-103 | 325 | FTFTSYDMG | 623 | SAIVSSGSLTLYA | 921 | CARRHWPGGFDYW |
| TIGIT-211-104 | 326 | FTFSPRRMS | 624 | SGISPSGGITTYA | 922 | CARHNRAIGTFDYW |
| TIGIT-211-105 | 327 | FTFGNYRMT | 625 | SSINRHGWVTYYA | 923 | CARSVLLDYW |
| TIGIT-211-106 | 328 | FTFGNYGMT | 626 | SYINRNGGITYYA | 924 | CARSDRVGFCCW |
| TIGIT-211-107 | 329 | FTFSPYPMM | 627 | SAIIGTGSNTYYA | 925 | CAKVRTFRLNYC |
| TIGIT-211-108 | 330 | FTFSSYFVT | 628 | GVIWGGGDTYYV | 926 | CAKYTGRWEPYDYW |
| TIGIT-211-109 | 331 | FTFSDYTMN | 629 | SGISPSGGITTYA | 927 | CAKQAPGEKWLARGRLHYW |
| TIGIT-211-110 | 332 | FTFFPYAMG | 630 | SSIDDRGRYTYYA | 928 | CAKVRPFWGTFDYW |
| TIGIT-211-111 | 333 | FTFVWYDMG | 631 | SAISGRGDNTYYA | 929 | CAKAVPKGFDYW |
| TIGIT-211-112 | 334 | FTFSSYFMT | 632 | SSISSTGCNTYYA | 930 | CAKTPRKFDYW |
| TIGIT-211-113 | 335 | LIFAWYDMG | 633 | STIGSSGYPTYYA | 931 | CAKAVPKGFDYW |
| TIGIT-211-114 | 336 | FTFEGYPMS | 634 | STISSGGGYTYYP | 932 | CAKQAPGEKWLARGRLDYW |
| TIGIT-211-115 | 337 | FTFSNYGVS | 635 | GYINPSGGYTYYA | 933 | CARSYGGGFDYW |
| TIGIT-211-116 | 338 | FTFSRYFMG | 636 | SAISGSGGNTYYA | 934 | CARVWRNHLDYW |
| TIGIT-269-1 | 339 | GIFSSYAIS | 637 | GGIIPTNYA | 935 | CARWRGGLSAFDVW |
| TIGIT-269-2 | 340 | GTYTTHGIS | 638 | GGIIPINYA | 936 | CARAFGLASGKGPGVFDYW |
| TIGIT-269-3 | 341 | FSFGSYAMS | 639 | SAITGSYYA | 937 | CARVLGNSGRGLDYW |
| TIGIT-269-4 | 342 | GPFNKYAIS | 640 | GGIIPMNYA | 938 | CARGSHQLYYAFEYW |
| TIGIT-269-5 | 343 | FTFSTYLMI | 641 | SAISGSYYA | 939 | CARDVEGQVGHFFDPW |
| TIGIT-269-6 | 344 | FTLSSYSMS | 642 | SAINPSYYA | 940 | CAKGIKAFGGTRLPLYFDSW |
| TIGIT-269-7 | 345 | FTFGNYAMS | 643 | SAITGSYYA | 941 | CAKHLLSRSRGLDVW |
| TIGIT-269-8 | 346 | FTFGTYSMS | 644 | SAITGSYYA | 942 | CAKHLLARSGGMHLW |
| TIGIT-269-9 | 347 | FSFSNHAMS | 645 | SAISGSYYA | 943 | CARSTRDRAFDYW |
| TIGIT-269-10 | 348 | FSFSSSGMS | 646 | SAISGSYYA | 944 | CVKVGDYFAFDHW |
| TIGIT-269-11 | 349 | GTFRRHAIS | 647 | GGIIPMNYA | 945 | CARGTALVRRAFDIW |
| TIGIT-269-12 | 350 | GTYTTHGIS | 648 | GGIIPINYA | 946 | CARAFGLASGKGPGVFDYW |
| TIGIT-269-13 | 351 | FTFSNYAMS | 649 | SAISGGYYA | 947 | CAKHRVGARAFDVW |
| TIGIT-269-14 | 352 | FTFSNYAMS | 650 | SAISGNYYA | 948 | CAKHRVGARAFDVW |
| TIGIT-269-15 | 353 | GTFNIYAIS | 651 | GGIIPINYA | 949 | CARHPRDFGIHGLDVW |
| TIGIT-269-16 | 354 | GTFSRYGIS | 652 | GGIIPINYA | 950 | CARVRGGYYYDTW |
| TIGIT-269-17 | 355 | GTFTNHAIS | 653 | GGINPLNYA | 951 | CATGGGHFRSGRDVW |
| TIGIT-269-18 | 356 | FTFASYAMS | 654 | SAITNSYYA | 952 | CARHLRLGRGFDSW |
| TIGIT-269-19 | 357 | GTFTYYPIS | 655 | GGIIPFNYA | 953 | CATPSGGIGRRLDVW |
| TIGIT-269-20 | 358 | GTYTTHGIS | 656 | GGIIPINYA | 954 | CAKAFGLASGKGPGVFDYW |
| TIGIT-269-21 | 359 | GTFSQYAIS | 657 | GGIIPMNYA | 955 | CARESRTLFGVPNAFDIW |
| TIGIT-471-001 | 1847 | FTFSNYGVS | 1896 | GYINPSRGYTYYA | 1945 | CARSYGGGFDYW |
| TIGIT-471-009 | 1848 | FTFVRYDMA | 1897 | STISSGGDYTYYP | 1946 | CAKDTYNHFDYW |
| TIGIT-471-017 | 1849 | FTFSKYGMS | 1898 | SYINSSRGYTYYA | 1947 | CARSSGGGFDYW |
| TIGIT-471-025 | 1850 | FTFSRYFMG | 1899 | SEISPSGKKKYYA | 1948 | CAKSSFDKYNFDYW |
| TIGIT-471-033 | 1851 | FTFHKYGMT | 1900 | SAISSGGGYTYYP | 1949 | CARDTYLHFDYW |
| TIGIT-471-041 | 1852 | FTFSRYVMG | 1901 | SEISPSGKKKYYA | 1950 | CAKSSFDKYNFDYW |
| TIGIT-471-049 | 1853 | FTFSTYAMN | 1902 | TEISPSGKKKYYA | 1951 | CAKSSFDKYNFDYW |
| TIGIT-471-005 | 1854 | CTFSSYLMS | 1903 | GVIWGGGGTYYA | 1952 | CAKGGTSFDYW |
| TIGIT-471-013 | 1855 | FTFNAYPMT | 1904 | SGITGSGGSTYYA | 1953 | CARDGSYSSSWYGYW |
| TIGIT-471-021 | 1856 | FTFHKYGMA | 1905 | STISSGGGYTYYP | 1954 | CARDTYLHFEYW |
| TIGIT-471-029 | 1857 | FTFHKYGMA | 1906 | STISSGGGYTYYP | 1955 | CARDTYLHFDYW |
| TIGIT-471-037 | 1858 | FTFSPYSMS | 1907 | SEISPSGKKKYYA | 1956 | CARSSFDKYNFDYW |
| TIGIT-471-045 | 1859 | FTFSRYFMG | 1908 | SEISPSGKKKYYA | 1957 | CAKSSFDKYNFDYW |
| TIGIT-471-002 | 1860 | FTFSSYFMS | 1909 | GVIWGGGGTYYA | 1958 | CAKGGTSFDYW |
| TIGIT-471-010 | 1861 | FTFSRYIMG | 1910 | SEISLIGKKKYYA | 1959 | CAKSSFDKYNFDYW |
| TIGIT-471-018 | 1862 | FTFSNYGVS | 1911 | GYINRSREYTYYA | 1960 | CARSYGGGFDYW |
| TIGIT-471-026 | 1863 | FTFSRYAMN | 1912 | SEISPSGKKKYYA | 1961 | CAKSSFDKYNFDYW |
| TIGIT-471-034 | 1864 | FTFSRYFMG | 1913 | SEISPSGKKKYYA | 1962 | CAKSSFDKYNFDYW |
| TIGIT-471-042 | 1865 | FTFHKYGMA | 1914 | STISGGGGYTYYP | 1963 | CARDTYLHFDYW |
| TIGIT-471-006 | 1866 | FTFSKYGVS | 1915 | CYINSGSGYTYYA | 1964 | CARASYVHFDYW |
| TIGIT-471-014 | 1867 | FTFSSYFMS | 1916 | GVIWGGGGTYYA | 1965 | CAKGGTSFDYW |
| TIGIT-471-022 | 1868 | FTFSSYLMS | 1917 | GVIWGGGGTYYA | 1966 | CAKGGTSFDYW |
| TIGIT-471-030 | 1869 | FTFSRYVMN | 1918 | SEISPSGKKKYYA | 1967 | CAKSSFDKYNFDYW |
| TIGIT-471-038 | 1870 | FTFSNYGVS | 1919 | GYINPSRGYTYYA | 1968 | CARSYGGGFDYW |
| TIGIT-471-046 | 1871 | FTFEDETMS | 1920 | SAISGSGGGTSYA | 1969 | CARDVIAGPFDYW |
| TIGIT-471-003 | 1872 | FTFSNYGVS | 1921 | SWISPHGALTYYA | 1970 | CAKGRRRFDYW |
| TIGIT-471-011 | 1873 | FTFSNYGVS | 1922 | SSIDWHGWVTYYA | 1971 | CVKNALRFDYW |
| TIGIT-471-019 | 1874 | FTFSNYGVS | 1923 | VYINPSRGYTYYA | 1972 | CARSYGGGFDYW |
| TIGIT-471-027 | 1875 | FTFSNYGVS | 1924 | SWISPHGALTYYA | 1973 | CAKGRRRFDYW |
| TIGIT-471-035 | 1876 | FTFNAYPMT | 1925 | SAITGSGGSTYYA | 1974 | CARVWRNHLDYW |
| TIGIT-471-043 | 1877 | FTFEHNDMH | 1926 | SGISPSGGITTYA | 1975 | CAKQAPGEKWLARGRLDYW |
| TIGIT-471-007 | 1878 | LHSRSYVMG | 1927 | SEISRSGKKKYYA | 1976 | CAKSSFGEYNFDYW |
| TIGIT-471-015 | 1879 | FTFDKYDMA | 1928 | STICSGGDYTYYP | 1977 | CARDTYIHFDYW |
| TIGIT-471-023 | 1880 | FTFNKYPMM | 1929 | STIGPSGTSTYYA | 1978 | CARRSYFRRFDYW |
| TIGIT-471-031 | 1881 | FTFSRYAMN | 1930 | SEISPSGKKKYYA | 1979 | CAKSSFDKYNFDYW |
| TIGIT-471-039 | 1882 | FTFNADPMS | 1931 | SAITGSGGSTYYA | 1980 | CARDGSYSSSWYGYW |
| TIGIT-471-047 | 1883 | FTFEVYTMA | 1932 | SSIHPKGYPTRYA | 1981 | CAKGWFGNFDYW |
| TIGIT-471-004 | 1884 | FTFHKYGMT | 1933 | SSISSGGGYTYYP | 1982 | CARDTYLHFDYW |
| TIGIT-471-012 | 1885 | FTFNKYPMM | 1934 | SGITRSGSTNYR | 1983 | CAKKLSNGFDYW |
| TIGIT-471-020 | 1886 | SSVSRYVMG | 1935 | SEISRIGKKKCYA | 1984 | CEKSSFDKYNFDYW |
| TIGIT-471-028 | 1887 | FTFPVYNMA | 1936 | SGIYPSGGSTVYA | 1985 | CARHRAGSSGWYSDYW |
| TIGIT-471-036 | 1888 | FTFSSYFMS | 1937 | GVIWGGGGTYYA | 1986 | CAKGGTSFDYW |
| TIGIT-471-044 | 1889 | FTFSRYFMG | 1938 | SEISPSGKKKYYA | 1987 | CAKSSFDKYNFHYW |
| TIGIT-471-008 | 1890 | FTFEPVIMG | 1939 | SSISPNGWDTYYA | 1988 | CATETSPNDYW |
| TIGIT-471-016 | 1891 | FTFHKYGMA | 1940 | STISSGGGYTYYP | 1989 | CARDTYLHFDYW |
| TIGIT-471-024 | 1892 | FTFEPVIMG | 1941 | SSISPNGWDTYYA | 1990 | CATETSPNDYW |
| TIGIT-471-032 | 1893 | FTFHKYGMA | 1942 | STISSGGGYTYYP | 1991 | CARDTYLHFDYW |
| TIGIT-471-040 | 1894 | FTFHKYGMA | 1943 | STISSGGGYTYYP | 1992 | CARDTYLHFDYW |
| TIGIT-471-048 | 1895 | FTFSNYGVS | 1944 | GYINPSRGYTYYA | 1993 | CARSYGGGFDYW |

TABLE 12
Variable Domain of Light Chain CDR Sequences

| | SEQ | | SEQ | | SEQ | |
|---|---|---|---|---|---|---|
| | ID | | ID | | ID | |
| Variant | NO | CDR1 | NO | CDR2 | NO | CDR3 |
| TIGIT-211-1 | 956 | RSSQSLVHSTGNTYLH | 1093 | AASDLES | 1230 | CQQGHTLPWTF |
| TIGIT-211-2 | 957 | RTSQDIGNYLN | 1094 | PKHNRPP | 1231 | CQQSYNSPWTF |
| TIGIT-211-3 | 958 | RSSQSLVHSTGNTYLH | 1095 | AASDLES | 1232 | CQQGHTLPWTF |
| TIGIT-211-4 | 959 | RSSQSLVHSTGNTYLH | 1096 | AASDLES | 1233 | CQQGHTLPWTF |
| TIGIT-211-5 | 960 | RSSQSLVHSTGNTYLH | 1097 | AASDLES | 1234 | CQQGHTLPWTF |
| TIGIT-211-6 | 961 | RSSQSLVHSTGNTYLH | 1098 | AASDLES | 1235 | CQQGHTLPWTF |
| TIGIT-211-7 | 962 | SGDKLRNKYAS | 1099 | GQHNRPS | 1236 | CQGSYYSGSGWYYAF |
| TIGIT-211-8 | 963 | RSSQSLVHSTGNTYLH | 1100 | AASDLES | 1237 | CQQGHTLPWTF |
| TIGIT-211-9 | 964 | RSSQSLVHSTGNTYLH | 1101 | AASDLES | 1238 | CQQGHTLPWTF |
| TIGIT-211-10 | 965 | RSSQSLVHSTGNTYLH | 1102 | AASDLES | 1239 | CQQGHTLPWTF |
| TIGIT-211-11 | 966 | RSSQSLVHSTGNTYLH | 1103 | AASDLES | 1240 | CQQGHTLPWTF |
| TIGIT-211-12 | 967 | SGDKLGHTYTS | 1104 | YTSSLHS | 1241 | CATRAVRGNPHVLF |
| TIGIT-211-13 | 968 | RASQSIREYLH | 1105 | FGSELRK | 1242 | CGQGVLWPATF |
| TIGIT-211-14 | 969 | SGDTLGGKYAW | 1106 | QNDKRPS | 1243 | CHQWSSYPTF |
| TIGIT-211-15 | 970 | QSSQSVYSNNELS | 1107 | GTSYRYS | 1244 | CSSWAGSRSGTVF |
| TIGIT-211-16 | 971 | SGDKLGHTYTS | 1108 | RTSWLQS | 1245 | CQQYHSYPPTF |
| TIGIT-211-17 | 972 | RASQTIERRLN | 1109 | QNDKRPS | 1246 | CQQSYSIPPTF |
| TIGIT-211-18 | 973 | SGDKLGDKYTS | 1110 | HTSRLQD | 1247 | CQQSYNLPLTF |
| TIGIT-211-19 | 974 | RSSQSLVHSTGNTYLH | 1111 | AASDLES | 1248 | CQQGHTLPWTF |
| TIGIT-211-20 | 975 | RSSQSLVHSTGNTYLH | 1112 | AASDLES | 1249 | CQQGHTLPWTF |
| TIGIT-211-21 | 976 | RSSQSLVHSTGNTYLH | 1113 | AASDLES | 1250 | CQQGHTLPWTF |
| TIGIT-211-22 | 977 | RASQGVRTSLA | 1114 | AKNNRPS | 1251 | CQQSYHTPQTF |
| TIGIT-211-23 | 978 | RSSQSLVHSTGNTYLH | 1115 | AASDLES | 1252 | CQQGHTLPWTF |
| TIGIT-211-24 | 979 | RSSQSLVHSTGNTYLH | 1116 | AASDLES | 1253 | CQQGHTLPWTF |
| TIGIT-211-25 | 980 | RASQTIERRLN | 1117 | AKNNRPS | 1254 | CQQTALVPYTF |
| TIGIT-211-26 | 981 | RASQTIGDYLN | 1118 | GASSRAT | 1255 | CAQGAALPRTF |
| TIGIT-211-27 | 982 | RSSQSLVHSTGNTYLH | 1119 | AASDLES | 1256 | CQQGHTLPWTF |
| TIGIT-211-28 | 983 | QGASLRNYYAS | 1120 | DTSKVAS | 1257 | CFQGSHIPYTF |
| TIGIT-211-29 | 984 | RASQSISNNLN | 1121 | AKNNRPS | 1258 | CQQSYTTPPTF |
| TIGIT-211-30 | 985 | RASQPIGPDLL | 1122 | RKSNRPS | 1259 | CQQSYSTPYTF |
| TIGIT-211-31 | 986 | RASQSIRRFLN | 1123 | WASDRES | 1260 | CQQTATWPFTF |
| TIGIT-211-32 | 987 | RSSQSLVHSTGNTYLH | 1124 | AASDLES | 1261 | CQQGHTLPWTF |
| TIGIT-211-33 | 988 | RSSQSLVHSTGNTYLH | 1125 | AASDLES | 1262 | CQQGHTLPWTF |
| TIGIT-211-34 | 989 | RANQNIGNFLN | 1126 | QDFKRPS | 1263 | CHQRSSYPWTF |
| TIGIT-211-35 | 990 | SGNKLGDKYAS | 1127 | RTSWLQS | 1264 | CVARAVRGNPHVLF |
| TIGIT-211-36 | 991 | RSSQSLVHSTGNTYLH | 1128 | AASDLES | 1265 | CQQGHTLPWTF |
| TIGIT-211-37 | 992 | RSSQSLVHSTGNTYLH | 1129 | AASDLES | 1266 | CQQGHTLPWTF |
| TIGIT-211-38 | 993 | RSSQSLVHSTGNTYLH | 1130 | AASDLES | 1267 | CQQGHTLPWTF |
| TIGIT-211-39 | 994 | RSSQSLVHSTGNTYLH | 1131 | AASDLES | 1268 | CQQGHTLPWTF |
| TIGIT-211-40 | 995 | RASQDIGNFLN | 1132 | RTSWLQS | 1269 | CQQRSSYPPTF |
| TIGIT-211-41 | 996 | RSSQSLVHSTGNTYLH | 1133 | AASDLES | 1270 | CQQGHTLPWTF |
| TIGIT-211-42 | 997 | RASQGVRTSLA | 1134 | GKNIRPS | 1271 | CQQSYSFPLTF |
| TIGIT-211-43 | 998 | RASQSIRRYLN | 1135 | WASDRES | 1272 | CQQSFSTPLTF |
| TIGIT-211-44 | 999 | RSSQSLVHSTGNTYLH | 1136 | AASDLES | 1273 | CQQGHTLPWTF |
| TIGIT-211-45 | 1000 | RASQSIRRYLN | 1137 | DASNLQS | 1274 | CQQSYDFPRTF |
| TIGIT-211-46 | 1001 | RSSQSLVHSTGNTYLH | 1138 | AASDLES | 1275 | CQQGHTLPWTF |
| TIGIT-211-47 | 1002 | RSSQSLVHSTGNTYLH | 1139 | AASDLES | 1276 | CQQGHTLPWTF |
| TIGIT-211-48 | 1003 | RSSQSLVHSTGNTYLH | 1140 | AASDLES | 1277 | CQQGHTLPWTF |
| TIGIT-211-49 | 1004 | RSSQSLVHSTGNTYLH | 1141 | AASDLES | 1278 | CQQGHTLPWTF |
| TIGIT-211-50 | 1005 | RSSQSLVHSTGNTYLH | 1142 | AASDLES | 1279 | CQQGHTLPWTF |
| TIGIT-211-51 | 1006 | RASQGVRTSLA | 1143 | AKNNRPS | 1280 | CQQSYSAPYTF |
| TIGIT-211-52 | 1007 | RSSQSLVHSTGNTYLH | 1144 | AASDLES | 1281 | CQQGHTLPWTF |
| TIGIT-211-53 | 1008 | RASQTIGDYLN | 1145 | GQHNRPS | 1282 | CQQSFSIPWTF |
| TIGIT-211-54 | 1009 | KASDHIGKFLT | 1146 | AASKLAS | 1283 | CQQVVWRPFTF |
| TIGIT-211-55 | 1010 | RASQTIGDYLN | 1147 | HDNKRPS | 1284 | CQQDAFHPPTF |
| TIGIT-211-56 | 1011 | RSSQSLVHSTGNTYLH | 1148 | AASDLES | 1285 | CQQGHTLPWTF |
| TIGIT-211-57 | 1012 | RSSQSLVHSTGNTYLH | 1149 | GKNIRPS | 1286 | CQQSYTTPWTF |
| TIGIT-211-58 | 1013 | RSSQSLVHSTGNTYLH | 1150 | AASDLES | 1287 | CQQGHTLPWTF |
| TIGIT-211-59 | 1014 | RSSQSLVHSTGNTYLH | 1151 | AASDLES | 1288 | CQQGHTLPWTF |
| TIGIT-211-60 | 1015 | RSSQSLVHSTGNTYLH | 1152 | AASDLES | 1289 | CQQGHTLPWTF |
| TIGIT-211-61 | 1016 | RSSQSLVHSTGNTYLH | 1153 | AASDLES | 1290 | CQQGHTLPWTF |
| TIGIT-211-62 | 1017 | RSSQSLVHSTGNTYLH | 1154 | AASDLES | 1291 | CQQGHTLPWTF |
| TIGIT-211-63 | 1018 | RSSQSLVHSTGNTYLH | 1155 | AASDLES | 1292 | CQQGHTLPWTF |
| TIGIT-211-64 | 1019 | RSSQSLVHSTGNTYLH | 1156 | AASDLES | 1293 | CQQGHTLPWTF |
| TIGIT-211-65 | 1020 | RSSQSLVHSTGNTYLH | 1157 | AASDLES | 1294 | CQQGHTLPWTF |
| TIGIT-211-66 | 1021 | RSSQSLVHSTGNTYLH | 1158 | AASDLES | 1295 | CQQGHTLPWTF |
| TIGIT-211-67 | 1022 | RSSQSLVHSTGNTYLH | 1159 | AASDLES | 1296 | CQQGHTLPWTF |
| TIGIT-211-68 | 1023 | RSSQSLVHSTGNTYLH | 1160 | AASDLES | 1297 | CQQGHTLPWTF |
| TIGIT-211-69 | 1024 | RASQNIRSYLN | 1161 | GASTLQS | 1298 | CQQSYENPLTF |
| TIGIT-211-70 | 1025 | RSSQSLVHSTGNTYLH | 1162 | AASDLES | 1299 | CQQGHTLPWTF |
| TIGIT-211-71 | 1026 | RSSQSLVHSTGNTYLH | 1163 | AASDLES | 1300 | CQQGHTLPWTF |
| TIGIT-211-72 | 1027 | RASHNINSYLN | 1164 | GKNIRPS | 1301 | CQQSYIIPPTF |
| TIGIT-211-73 | 1028 | RSSQSLVHSTGNTYLH | 1165 | AASDLES | 1302 | CQQGHTLPWTF |
| TIGIT-211-74 | 1029 | RSSQSLVHSTGNTYLH | 1166 | AASDLES | 1303 | CQQGHTLPWTF |
| TIGIT-211-75 | 1030 | RSSQSLVHSTGNTYLH | 1167 | AASDLES | 1304 | CQQGHTLPWTF |
| TIGIT-211-76 | 1031 | RSSQSLVHSTGNTYLH | 1168 | AASDLES | 1305 | CQQGHTLPWTF |
| TIGIT-211-77 | 1032 | RASQSVRSYLN | 1169 | AASSLYS | 1306 | CQQYASVPVTF |
| TIGIT-211-78 | 1033 | RSSQSLVHSTGNTYLH | 1170 | AASDLES | 1307 | CQQGHTLPWTF |
| TIGIT-211-79 | 1034 | RASQSVRSYLN | 1171 | AATTLQS | 1308 | CQQSYIIPPTF |
| TIGIT-211-80 | 1035 | RASQGVRTSLA | 1172 | GKNIRPS | 1309 | CQQGYRWPVTF |
| TIGIT-211-81 | 1036 | RSSQSLVHSTGNTYLH | 1173 | AASDLES | 1310 | CQQGHTLPWTF |
| TIGIT-211-82 | 1037 | RSSQSLVHSTGNTYLH | 1174 | AASDLES | 1311 | CQQGHTLPWTF |
| TIGIT-211-83 | 1038 | SGDKLGDKYTS | 1175 | GASSRAT | 1312 | CMSRSIWGNPHVLF |
| TIGIT-211-84 | 1039 | SGDKLGHTYTS | 1176 | YTSSLHS | 1313 | CATRAVRGNPHVLF |
| TIGIT-211-85 | 1040 | RSSQSLVHSTGNTYLH | 1177 | AASDLES | 1314 | CQQGHTLPWTF |
| TIGIT-211-86 | 1041 | RSSQSLVHSTGNTYLH | 1178 | AASDLES | 1315 | CQQGHTLPWTF |
| TIGIT-211-87 | 1042 | RASQTIGDYLN | 1179 | QDFKRPS | 1316 | CQQYHDFPLTF |
| TIGIT-211-88 | 1043 | RSSQSLVHSTGNTYLH | 1180 | AASDLES | 1317 | CQQGHTLPWTF |
| TIGIT-211-89 | 1044 | RSSQSLVHSTGNTYLH | 1181 | AASDLES | 1318 | CQQGHTLPWTF |
| TIGIT-211-90 | 1045 | SGDRLGEKYVS | 1182 | GTTSLES | 1319 | CQQGYTLPWTF |
| TIGIT-211-91 | 1046 | RASQSIREYLH | 1183 | FGSELRK | 1320 | CQNGHSFPLTF |
| TIGIT-211-92 | 1047 | RSSQSLVHSTGNTYLH | 1184 | AASDLES | 1321 | CQQGHTLPWTF |
| TIGIT-211-93 | 1048 | SASQDINKYLN | 1185 | HTSRLQS | 1322 | CQQFAYFPATF |
| TIGIT-211-94 | 1049 | RSSQSLVHSTGNTYLH | 1186 | AASDLES | 1323 | CQQGHTLPWTF |
| TIGIT-211-95 | 1050 | RASQGVRTSLA | 1187 | AKNNRPS | 1324 | CQQSYSAPYTF |
| TIGIT-211-96 | 1051 | RSSQSLVHSTGNTYLH | 1188 | AASDLES | 1325 | CQQGHTLPWTF |
| TIGIT-211-97 | 1052 | RSSQSLVHSTGNTYLH | 1189 | AASDLES | 1326 | CQQGHTLPWTF |
| TIGIT-211-98 | 1053 | RASHFIGSLLS | 1190 | ETSKLAS | 1327 | CQQSYSYPRTF |
| TIGIT-211-99 | 1054 | RSSQSLVHSTGNTYLH | 1191 | AASDLES | 1328 | CQQGHTLPWTF |
| TIGIT-211-100 | 1055 | RSSQSLVHSTGNTYLH | 1192 | AASDLES | 1329 | CQQGHTLPWTF |
| TIGIT-211-101 | 1056 | RSSQSLVHSTGNTYLH | 1193 | AASDLES | 1330 | CQQGHTLPWTF |
| TIGIT-211-102 | 1057 | RASQSISNNLN | 1194 | AKNNRPS | 1331 | CQQSYTTPPTF |
| TIGIT-211-103 | 1058 | RSSQSLVHSTGNTYLH | 1195 | AASDLES | 1332 | CQQGHTLPWTF |
| TIGIT-211-104 | 1059 | RASQSISNNLN | 1196 | DASSSQS | 1333 | CQQSSSTPWTF |
| TTGIT-211-105 | 1060 | RSSQSLVHSTGNTYLH | 1197 | AASDLES | 1334 | CQQGHTLPWTF |
| TIGIT-211-106 | 1061 | RSSQSLVHSTGNTYLH | 1198 | AASDLES | 1335 | CQQGHTLPWTF |
| TIGIT-211-107 | 1062 | RSSQSLVHSTGNTYLH | 1199 | AASDLES | 1336 | CQQGHTLPWTF |
| TIGIT-211-108 | 1063 | RSSQSLVHSTGNTYLH | 1200 | AASDLES | 1337 | CQQGHTLPWTF |
| TIGIT-211-109 | 1064 | RSSQSLVHSTGNTYLH | 1201 | AASDLES | 1338 | CQQGHTLPWTF |
| TIGIT-2ll-llO | 1065 | RASQTIERRLN | 1202 | GTTSLES | 1339 | CQQSYTTLWTF |
| TTGIT-211-111 | 1066 | SGDNLRGYYAS | 1203 | GTSYRYS | 1340 | CQQNLAPPYTF |
| TIGIT-211-112 | 1067 | RSSQSLVHSTGNTYLH | 1204 | AASDLES | 1341 | CQQGHTLPWTF |
| TIGIT-211-113 | 1068 | SGDKLGHTYTS | 1205 | GKNIRPS | 1342 | CQQNLAPPYTF |
| TIGIT-211-114 | 1069 | RASQSISNNLN | 1206 | TASNLQN | 1343 | CQQSNSWPYTF |
| TIGIT-211-115 | 1070 | RSSQSLVHSTGNTYLH | 1207 | AASDLES | 1344 | CQQGHTLPWTF |
| TIGIT-211-116 | 1071 | RASQTIERRLN | 1208 | HDNKRPS | 1345 | CQQGYTLPWTF |
| TIGIT-269-1 | 1072 | RASQSVSSGYLA | 1209 | STSSRAT | 1346 | CQQSASAHPGWTF |
| TIGIT-269-2 | 1073 | RASQSINTFLN | 1210 | GASSLQS | 1347 | CQQGYRAPWTF |
| TIGIT-269-3 | 1074 | RASQSVSSYLN | 1211 | AATSLQS | 1348 | CQQGYSTPWTF |
| TIGIT-269-4 | 1075 | RASQSIRTYLN | 1212 | GASSLQS | 1349 | CQQSYRVPRSF |
| TIGIT-269-5 | 1076 | RASQSVSSGYLA | 1213 | DASSRAT | 1350 | CQHFGGSPLLTF |
| TIGIT-269-6 | 1077 | RASQHIGKYLN | 1214 | GASSLQS | 1351 | CQQTYSPVTF |
| TIGIT-269-7 | 1078 | RASQSIGGYLN | 1215 | AVSSLQS | 1352 | CQQGFYTPWTF |
| TIGIT-269-8 | 1079 | RASQSINTFLN | 1216 | GASSLQS | 1353 | CQQGYRAPWTF |
| TIGIT-269-9 | 1080 | RASQNIGKYLN | 1217 | AASSLQS | 1354 | CHQSYGIPWTF |
| TIGIT-269-10 | 1081 | RASQNIRNYLN | 1218 | GASSLQS | 1355 | CQQSYRSFFTF |
| TIGIT-269-11 | 1082 | RASQSIKNYLN | 1219 | TASSLQS | 1356 | CQQSYGNVWTF |
| TIGIT-269-12 | 1083 | RASQSINTFLN | 1220 | GASSLQS | 1357 | CQQGYRAPWTF |
| TIGIT-269-13 | 1084 | RASQSITRYLN | 1221 | TTSSLQS | 1358 | CLQAYSTPWTF |
| TIGIT-269-14 | 1085 | RASEKISTYLN | 1222 | AASSLQS | 1359 | CQQSHQTPWTF |
| TIGIT-269-15 | 1086 | RASQSVNSNHLA | 1223 | STSSRAT | 1360 | CQQSGSSSLTF |
| TIGIT-269-16 | 1087 | RASQSISNYLN | 1224 | GATSLQS | 1361 | CQQSYIMSQWTF |
| TIGIT-269-17 | 1088 | RASQSITRYLN | 1225 | GASSLQS | 1362 | CQQGFRAPRTF |
| TIGIT-269-18 | 1089 | RASQSVGSYLN | 1226 | SASSLQS | 1363 | CQQSHATPWTF |
| TIGIT-269-19 | 1090 | RASHSVSNNYLA | 1227 | GASSRAT | 1364 | CQLFDRSRPGYTF |
| TIGIT-269-20 | 1091 | RASQSINTFLN | 1228 | GASSLQS | 1365 | CQQGYRAPWTF |
| TIGIT-269-21 | 1092 | RASQSVSGTYLA | 1229 | GASSRAT | 1366 | CQQYKRSSGFTF |
| TIGIT-471-001 | 1994 | RASQTIERRLN | 2043 | DASSLHT | 2092 | CQQSYIIPPTF |
| TIGIT-471-009 | 1995 | RASHGVRTSLA | 2044 | GKNNRPT | 2093 | CQQSLAPPYTF |
| TIGIT-471-017 | 1996 | RATQAIERRLK | 2045 | DNSSRQT | 2094 | CQQSYIIPYTF |
| TIGIT-471-025 | 1997 | SASQDINKYLN | 2046 | HTSRLQS | 2095 | CQQYTYFPATF |
| TIGIT-471-033 | 1998 | RASQGVRTSLA | 2047 | AKNNRPS | 2096 | CQQSYSAPYTF |
| TIGIT-471-041 | 1999 | SASHDINEYLN | 2048 | HTSRLQS | 2097 | CQQFAYFPATF |
| TIGIT-471-049 | 2000 | RPAHNIGNFLN | 2049 | KTTWLHS | 2098 | CRHRSSYLPTF |
| TIGIT-471-005 | 2001 | RASQNIRSYLN | 2050 | GKNIRPS | 2099 | CQQYASVPVTF |
| TIGIT-471-013 | 2002 | SGNKLGDKYAS | 2051 | RISWLQS | 2100 | CVARPLRGNPHVLF |
| TIGIT-471-021 | 2003 | RASQGVRTSLA | 2052 | AKNNRPS | 2101 | CQQSYSAPYTF |
| TIGIT-471-029 | 2004 | RASQGVRTSLA | 2053 | AINNRPS | 2102 | CQQSYSAPYTF |
| TIGIT-471-037 | 2005 | SASQDIRRYLN | 2054 | HTSTLQS | 2103 | CQQYRLF |
| TIGIT-471-045 | 2006 | SASQDINKYLN | 2055 | HTSRLQS | 2104 | CQQYTYFF |
| TIGIT-471-002 | 2007 | RASQNIRSYLN | 2056 | GKNIRPS | 2105 | CQQYASVPVTF |
| TIGIT-471-010 | 2008 | SAYQDINKYLN | 2057 | HKSRLQS | 2106 | CQQFAYFPATF |
| TIGIT-471-018 | 2009 | RASQTIERRLN | 2058 | DTSSRHT | 2107 | CQQSYIIPPTF |
| TIGIT-471-026 | 2010 | RASQDIGNFLN | 2059 | RTSWLQS | 2108 | CQQRSSYPPTF |
| TIGIT-471-034 | 2011 | RASQSISSYVN | 2060 | RASTLAS | 2109 | CQQFAYFPATF |
| TIGIT-471-042 | 2012 | RASQVVSTSLS | 2061 | ANNNRAS | 2110 | CQQSYTAPYTF |
| TIGIT-471-006 | 2013 | RATQTIETSLK | 2062 | DKNSLQT | 2111 | CQQSYSTPHTF |
| TIGIT-471-014 | 2014 | RASQNIRSYLN | 2063 | GKNIRPS | 2112 | CQQYASVPVTF |
| TIGIT-471-022 | 2015 | RASQNIRSYLN | 2064 | GKNIRPS | 2113 | CQQYASVPVTF |
| TIGIT-471-030 | 2016 | CASQDINKFLN | 2065 | HTSRLQS | 2114 | CQQFASFPATF |
| TIGIT-471-038 | 2017 | RASQTIERRLN | 2066 | DASSLHT | 2115 | CQQSYIIPPTF |
| TIGIT-471-046 | 2018 | AASGFNIKDTYIH | 2067 | GTTSLES | 2116 | CQQSYSTPRTF |
| TIGIT-471-003 | 2019 | RASQTISSYLN | 2068 | ENNNRPS | 2117 | CQQSYIIPPTF |
| TIGIT-471-011 | 2020 | SASQDINKYLN | 2069 | HTSRLQS | 2118 | CQQVVWRPFTF |
| TIGIT-471-019 | 2021 | RASQTIERRLN | 2070 | DASSLHT | 2119 | CQQSYIIPPTF |
| TIGIT-471-027 | 2022 | RASQTISSYLN | 2071 | ENNNRPS | 2120 | CQQSYIIPPTF |
| TIGIT-471-035 | 2023 | SGDKLGHTYTS | 2072 | RASTLAS | 2121 | CQQGYTLPWTF |
| TIGIT-471-043 | 2024 | RANQNIGNFLN | 2073 | HTSRLQD | 2122 | CQQLAF |
| TIGIT-471-007 | 2025 | SASQDINKYLN | 2074 | HTSRLQS | 2123 | CQQFAYFPATF |
| TIGIT-471-015 | 2026 | RASHGVRTSLA | 2075 | GKNNRPT | 2124 | CQQSYSAPYTF |
| TIGIT-471-023 | 2027 | RATQSIRSFLN | 2076 | KVSNRFS | 2125 | CQQYDAYPPTL |
| TIGIT-471-031 | 2028 | RASQDIGNFLN | 2077 | RTSWLQS | 2126 | CQQRSSYSATF |
| TIGIT-471-039 | 2029 | SGNKLGDKYAS | 2078 | RTTWLQS | 2127 | CVARAVRGNPLVLF |
| TIGIT-471-047 | 2030 | RASQGVRTSLA | 2079 | GKNIRPI | 2128 | CGQSYRYRLTF |
| TIGIT-471-004 | 2031 | RASQGVRTSLA | 2080 | AKNNRPS | 2129 | CQQSYSAPYTF |
| TIGIT-471-012 | 2032 | RASQRISSFLN | 2081 | GKNIRPS | 2130 | CQQSYELPLTF |
| TIGIT-471-020 | 2033 | CASQDINKYLN | 2082 | HTSRLQS | 2131 | CQQFAYFPATF |
| TIGIT-471-028 | 2034 | RASQSVDRYFN | 2083 | AASSLYS | 2132 | CQQSYRTPLTF |
| TIGIT-471-036 | 2035 | RASQNERSYLN | 2084 | GKNIRPS | 2133 | CQQYASVPVTF |
| TIGIT-471-044 | 2036 | SASQDINKYLN | 2085 | HTSTLQS | 2134 | CQQFAYFPATF |
| TIGIT-471-008 | 2037 | RSSQSLVHSTGNTYLH | 2086 | QMSHLAS | 2135 | CQQSYSAPTF |
| TIGIT-471-016 | 2038 | RASQGVRTSLA | 2087 | AKNNRPS | 2136 | CQQSYSAPYTF |
| TIGIT-471-024 | 2039 | RSSQSLVHSTGNTYLH | 2088 | QMSHLAS | 2137 | CQQSYSAPTF |
| TIGIT-471-032 | 2040 | RASQGVRTSLA | 2089 | AKNNRPS | 2138 | CQQSYSVPYTF |
| TIGIT-471-040 | 2041 | RASQGVRTSLA | 2090 | ALNNRPS | 2139 | CQQSYSAPYTF |
| TIGIT-471-048 | 2042 | GASQTIERRLN | 2091 | DASSLHT | 2140 | CQQSYIIPPTF |

TABLE 13
Variable Domain of Heavy Chain Sequences

| | SEQ | |
|---|---|---|
| Variant | ID NO | Variable Domain of Heavy Chain |
| TIGIT-29-01 | 1367 | EVQLVESGGGLVQAGGSLRLSCAASGRTFSNYAMGWFRQAPGKEREFVAAITWSGT |
| | | RTDYADSVKGRFTISADNAKNTVYLQMNSLKPEDTAVYYCAAAAWTIYEYDYWGQ |
| | | GTQVTVSS |
| TIGIT-29-02 | 1368 | EVQLVESGGGLVQAGGSLRLSCAASGRTFDIYAMGWFRQAPGKEREWVSTISWSGG |
| | | RTYYADSVKGRFTISADNAKNTVYLQMNSLKPEDTAVYYCAARPVYRTYGSWGQG |
| | | TQVTVSS |
| TIGIT-29-03 | 1369 | EVQLVESGGGLVQAGGSLRLSCAASGFTFSSYAMGWFRQAPGKEREFVAAITWSGT |
| | | RTDYADSVKGRFTISADNAKNTVYLQMNSLKPEDTAVYYCAAAAWRYSEYDYWG |
| | | QGTQVTVSS |
| TIGIT-29-4 | 1370 | EVQLVESGGGLVQAGGSLRLSCAASGSTFDTYVMGWFRQAPGKERELVSTISSDGDS |
| | | TYYADSVKGRFTISADNAKNTVYLQMNSLKPEDTAVYYCAAGTRRGRNYWGQGTQ |
| | | VTVSS |
| TIGIT-29-5 | 1371 | EVQLVESGGGLVQAGGSLRLSCAASGRTFSIYAMGWFRQAPGKEREWVATISSSGD |
| | | RTYYADSVKGRFTISADNAKNTVYLQMNSLKPEDTAVYYCAARRYGRRYDYWGQ |
| | | GTQVTVSS |
| TIGIT-29-06 | 1372 | EVQLVESGGGLVQAGGSLRLSCAASGGTFRSYVMGWFRQAPGKEREWVATINSSGS |
| | | RTYYADSVKGRFTISADNAKNTVYLQMNSLKPEDTAVYYCAARPNYRDYEYWGQG |
| | | TQVTVSS |
| TIGIT-29-07 | 1373 | EVQLVESGGGLVQAGGSLRLSCAASGSIFSNYAMGWFRQAPGKEREFVATISRGGTR |
| | | TNYADSVKGRFTISADNAKNTVYLQMNSLKPEDTAVYYCAAAAWTIYAYNYWGQ |
| | | GTQVTVSS |
| TIGIT-29-8 | 1374 | EVQLVESGGGLVQAGGSLRLSCAASGRTLDDYVMGWFRQAPGKEREGVATISGGG |
| | | DTTYYADSVKGRFTISADNAKNTVYLQMNSLKPEDTAVYYCAAVPWRWTTRRDY |
| | | WGQGTQVTVSS |
| TIGIT-29-9 | 1375 | EVQLVESGGGLVQAGGSLRLSCAASGFTFDNYAMGWFRQAPGKEREFVSSITWSGG |
| | | RTSYADSVKGRFTISADNAKNTVYLQMNSLKPEDTAVYYCAANAWTIYRYDYWGQ |
| | | GTQVTVSS |
| TIGIT-29-10 | 1376 | EVQLVESGGGLVQAGGSLRLSCAASGRTFSNYGMGWFRQAPGKEREFVSGISGSGG |
| | | RTSYADSVKGRFTISADNAKNTVYLQMNSLKPEDTAVYYCAANLWYPVDRLNTGF |
| | | NYWGQGTQVTVSS |
| TIGIT-29-11 | 1377 | EVQLVESGGGLVQAGGSLRLSCAASGRTLSSYAMGWFRQAPGKEREFVASITWGGG |
| | | RTYYADSVKGRFTISADNAKNTVYLQMNSLKPEDTAVYYCATRLWGTWTAGDYD |
| | | YWGQGTQVTVSS |
| TIGIT-29-12 | 1378 | EVQLVESGGGLVQAGGSLRLSCAASGSTFSSYAMGWFRQAPGKEREFVAAITWSGT |
| | | RTNYADSVKGRFTISADNAKNTVYLQMNSLKPEDTAVYYCAAAAWTIYTYDSWGQ |
| | | GTQVTVSS |
| TIGIT-29-13 | 1379 | EVQLVESGGGLVQAGGSLRLSCAASGFIFSNYAMGWFRQAPGKEREFVAAITWSGG |
| | | RTYYADSVKGRFTISADNAKNTVYLQMNSLKPEDTAVYYCAAAAWTIYEYDYWGQ |
| | | GTQVTVSS |
| TIGIT-29-14 | 1380 | EVQLVESGGGLVQAGGSLRLSCAASGFTFSDYVMGWFRQAPGKEREFVSAISWSGT |
| | | NTNYADSVKGRFTISADNAKNTVYLQMNSLKPEDTAVYYCATRALRDGRGYWGQG |
| | | TQVTVSS |
| TIGIT-29-15 | 1381 | EVQLVESGGGLVQAGGSLRLSCAASGRTFDSYAMGWFRQAPGKEREGVATISGSGG |
| | | RTYYADSVKGRFTISADNAKNTVYLQMNSLKPEDTAVYYCAAAAWTIYEFDSWGQ |
| | | GTQVTVTS |
| TIGIT-29-16 | 1382 | EVQLVESGGGLVQAGGSLRLSCAASGSIFSIYAMGWFRQAPGKEREWVATISWGGN |
| | | STYYADSVKGRFTISADNAKNTVYLQMNSLKPEDTAVYYCAARPRFRTYGYWGQG |
| | | TQVTVSS |
| TIGIT-29-17 | 1383 | EVQLVESGGGLVQAGGSLRLSCAASGSTLSIYAMGWFRQAPGKERELVATISSGGGS |
| | | TYYADSVKGRFTISADNAKNTVYLQMNSLKPEDTAVYYCAAGSVYGRNYWGQGT |
| | | QVTVSS |
| TIGIT-29-18 | 1384 | EVQLVESGGGLVQAGGSLRLSCAASGSTFSNYAMGWFRQAPGKEREFVSAINSSGSR |
| | | TYYADSVKGRFTISADNAKNTVYLQMNSLKPEDTAVYYCAARLWGTWTAGDYDY |
| | | WGQGTQVTVSS |
| TIGIT-29-19 | 1385 | EVQLVESGGGLVQAGGSLRLSCAASGRTFSSYAMGWFRQAPGKEREFVATISGSFGR |
| | | TYYADSVKGRFTISADNAKNTVYLQMNSLKPEDTAVYYCAAGAWTIYEYDYWGQG |
| | | TQVTVSS |
| TIGIT-29-20 | 1386 | EVQLVESGGGLVQAGGSLRLSCAASGSTFSIYAMGWFRQAPGKERELVASISWSGDT |
| | | TNYADSVKGRFTISADNAKNTVYLQMNSLKPEDTAVYYCAAGSVYGRNSWGQGTQ |
| | | VTVTS |
| TIGIT-29-21 | 1387 | EVQLVESGGGLVQAGGSLRLSCAASGSTFSNYAMGWFRQAPGKERELVSAITWSSS |
| | | RTYYADSVKGRFTISADNAKNTVYLQMNSLKPEDTAVYYCAAAAWTIYNFEYWGQ |
| | | GTQVTVSS |
| TIGIT-29-22 | 1388 | EVQLVESGGGLVQAGGSLRLSCAASGSILSSYTMGWFRQAPGKEREFVSTISRSSTRT |
| | | YYADSVKGRFTISADNAKNTVYLQMNSLKPEDTAVYYCAARLWGTWTAGDYDYW |
| | | GQGTQVTVSS |
| TIGIT-29-23 | 1389 | EVQLVESGGGLVQAGGSLRLSCAASGSTFDIYAMGWFRQAPGKEREFVASISSGDTN |
| | | TNYADSVKGRFTISADNAKNTVYLQMNSLKHEDTAVYYCAAGRYSGYNSWGQGT |
| | | QVTVSS |
| TIGIT-29-24 | 1390 | EVQLVESGGGLVQAGGSLRLSCAASGRTFDTYAMGWLRQAPGKEREFVSAISTGDG |
| | | STNYADSVKGRFTISADNAKNTVYLQMNSLKPEDTAVYYCAAARRSGRGSWGQGT |
| | | QVTVTS |
| TIGIT-29-25 | 1391 | EVQLVESGGGLVQAGGSLRLSCAASGFTFDNYAMGWFRQAPGKEREGVAAITWSG |
| | | GRTYYADSVKGRFTISADNAKNTVYLQMNSLKPEDTAVYYCAAAAWTIYEYDSWG |
| | | QGTQVTVTS |
| TIGIT-29-26 | 1392 | EVQLVESGGGLVQAGGSLRLSCAASGFTFDNYAMGWFRQAPGKEREFVATITWSGT |
| | | RTNYADSVKGRFTISADNAKNTVYLQMNSLKPEDTAVYYCAAAAWTIYDYDYWG |
| | | QGTQVTVSS |
| TIGIT-29-27 | 1393 | EVQLVESGGGLVQAGGSLRLSCAASGRTFSNNVMGWFRQAPGKEREFVAAISWGG |
| | | ASTNYADSVKGRFTISADNAKNTVYLQMNSLKPEDTAVYYCAAGPKTPDTRNYWG |
| | | QGTQVTVSS |
| TIGIT-29-28 | 1394 | EVQLVESGGGLVQAGGSLRLSCAASGFIFDSYAMGWFRQAPGKEREFVAAISWGGS |
| | | NTNYADSVKGRFTISADNAKNTVYLQMNSLKPEDTAVYYCAAVRITDGRDYWGQG |
| | | TQVTVSS |
| TIGIT-29-29 | 1395 | EVQLVESGGGLVQAGGSLRLSCAASGRTFSNYAMGWFRQAPGKEREFVAAITWSGT |
| | | RTDYADSVKGRFTISADNAKNTVYLQMNSLKPEDTAVYYCAAAAWTIYEYDYWGQ |
| | | GTQVTVSS |
| TIGIT-29-30 | 1396 | EVQLVESGGGLVQAGGSLRLSCAASGFTFSSYAMGWFRQAPGKEREFVAAITWSGT |
| | | RTDYADSVKGRFTISADNAKNTVYLQMNSLKPEDTAVYYCAAAAWRYSEYDYWG |
| | | QGTQVTVSS |
| TIGIT-29-31 | 1397 | EVQLVESGGGLVQAGGSLRLSCAASGFTFSIYAMGWFRQAPGKEREWVSTISWSGG |
| | | NTYYADSVKGRFTISADNAKNTVYLQMNSLKPEDTAVYYCATRPRFRRYDSWGQG |
| | | TQVTVSS |
| TIGIT-29-32 | 1398 | EVQLVESGGGLVQAGGSLRLSCAASGSTFDSYAMGWFRQAPGKEREGVAAITTSGS |
| | | STYYADSVKGRFTISADNAKNTVYLQMNSLKPEDTAVYYCAARGGVRSGSPGTYNY |
| | | WGQGTQVTVSS |
| TIGIT-29-33 | 1399 | EVQLVESGGGLVQAGGSLRLSCAASGFIFSTYAMGWFRQAPGKERELVSAITRSGITT |
| | | YYADSVKGRFTISADNAKNTVYLQMNSLKPEDTAVYYCAAAAWTIYEYDYWGQGT |
| | | QVTVSS |
| TIGIT-29-34 | 1400 | EVQLVESGGGLVQAGGSLRLSCAASGFTFRNYAMGWFRQAPGKEREFVSSISSSSSR |
| | | TSYADSVKGRFTISADNAKNTVYLQMNSLKPEDTAVYYCAARLWGTWTAGDYDY |
| | | WGQGTQVTVSS |
| TIGIT-29-35 | 1401 | EVQLVESGGGLVQAGGSLRLSCAASGRIFSIYTMGWFRQAPGKEREWVATINSSGSR |
| | | TYYADSVKGRFTISADNAKNTVYLQMNSLKPEDTAVYYCAARPSYNRYDSWGQGT |
| | | QVTVSS |
| TIGIT-29-36 | 1402 | EVQLVESGGGLVQAGGSLRLSCAASGFTFSSYAMGWFRQAPGKEREFVASITWSGTS |
| | | TNYADSVKGRFTISADNAKNTVYLQMNSLKPEDTAVYYCAAAAWTIYAYDYWGQ |
| | | GTQVTVSS |
| TIGIT-29-37 | 1403 | EVQLVESGGGLVQAGGSLRLSCAASGRTFSNYAMGWFRQAPGKEREFVAGISWSGT |
| | | RTYYADSVKGRFTISADNAKNTVYLQMNSLKPEDTAVYYCAAAAWTIYEYDYWGQ |
| | | GTQVTVSS |
| TIGIT-29-38 | 1404 | EVQLVESGGGLVQAGGSLRLSCAASGSTFSSYAMGWFRQAPGKEREFVSAISRNGAS |
| | | TSYADSVKGRFTISADNAKNTVYLQMNSLKPEDTAVYYCAAAGTRFDYWGQGTQV |
| | | TVSS |
| TIGIT-29-39 | 1405 | EVQLVESGGGLVQAGGSLRLSCAASGRTLDDYVMGWFRQAPGKEREGVATISGGG |
| | | DTTYYADSVKGRFTISADNAKNTVYLQMNSLKPEDTAVYYCAAVPWRWTTRRDY |
| | | WGQGTQVTVSS |
| TIGIT-29-40 | 1406 | EVQLVESGGGLVQAGGSLRLSCAASGFTFDNYAMGWFRQAPGKEREFVATITWSGT |
| | | RTNYADSVKGRFTISADNAKNTVYLQMNSLKPEDTAVYYCAAAAWTIYDYDYWG |
| | | QGTQVTVSS |
| TIGIT-29-41 | 1407 | EVQLVESGGGLVQAGGSLRLSCAASGRTFSTNAMGWFRQAPGKEREWVTAITTSGG |
| | | NTYYADSVKGRFTISADNAKNTVYLQMNSLKPEDTAVYYCAARDETYGTYDYWGQ |
| | | GTQVTVSS |
| TIGIT-29-42 | 1408 | EVQLVESGGGLVQAGGSLRLSCAASGSTFSTYAMGWFRQAPGKEREFVATISTSSSR |
| | | TYYADSVKGRFTISADNAKNTVYLQMNSLKPEDTAVYYCAARLWGTWTAGDYDY |
| | | WGQGTQVTVSL |
| TIGIT-29-43 | 1409 | EVQLVESGGGLVQAGGSLRLSCAASGRTFDSYAMGWFRQAPGKEREWVSAISWSGS |
| | | STYYADSVKGRFTISADNAKNTVYLQMNSLKPEDTAVYYCAARGGYGRYDSWGQG |
| | | TQVTVTS |
| TIGIT-29-44 | 1410 | EVQLVESGGGLVQAGGSLRLSCAASGFTFDNYAMGWFRQAPGKEREFVATITWSGT |
| | | TTNYADSVKGRFTISADNAKNTVYLQMNSLKPEDTAVYYCAAAAWTIYDYDYWGQ |
| | | GTQVTVSS |
| TIGIT-29-45 | 1411 | EVQLVESGGGLVQAGGSLRLSCAASGFTFSSYAMGWFRQAPGKEREFVASITWSGT |
| | | RTDYADSVKGRFTISADNAKNTVYLQMNSLKPEDTAVYYCAAAAWTIYGYEYWGQ |
| | | GTQVTVSS |
| TIGIT-29-46 | 1412 | EVQLVESGGGLVQAGGSLRLSCAASGSTFDIYAMGWFRQAPGKEREFVASISSGDTN |
| | | TYYADSVKGRFTISADNAKNTVYLQMNSLKHEDTAVYYCAAGRYSGYNSWGQGT |
| | | QVTVSS |
| TIGIT-29-47 | 1413 | EVQLVESGGGLVQAGGSLRLSCAASGSTLSSYAMGWFRQAPGKERELVAAITGSGG |
| | | RTYYADSVKGRFTISADNAKNTVYLQMNSLKPEDTAVYYCAANRRYSFPYWSFWY |
| | | DDFDYWGQGTQVTVSS |
| TIGIT-30-01 | 1414 | EVQLVESGGGLVQAGGSLRLSCAASGFAFSSYWMGWFRQAPGKERELVAARNSGG |
| | | NTNYADSVKGRFTISADNAKNTVYLQMNSLKPEDTAVYYCAADVWYGSTWRNWG |
| | | QGTQVTVSS |
| TIGIT-30-02 | 1415 | EVQLVESGGGLVQAGGSLRLSCAASGRTFGDYIMGWFRQAPGKERELVATISGGGS |
| | | TNYADSVKGRFTISADNAKNTVYLQMNSLKPEDTAVYYCAAVFSRGPLTWGQGTQ |
| | | VTVSS |
| TIGIT-30-03 | 1416 | EVQLVESGGGLVQAGGSLRLSCAASGNIFSRYIMGWFRQAPGKEREWVAGISNGGT |
| | | TKYADSVKGRFTISADNAKNTVYLQMNSLKPEDTAVYYCAQGWKIRPTIWGQGTQ |
| | | VTVSS |
| TIGIT-30-04 | 1417 | EVQLVESGGGLVQAGGSLRLSCAASGFTFSTHWMGWFRQAPGKERELVAARNSGG |
| | | NTNYADSVKGRFTISADNAKNTVYLQMNSLKPEDTAVYYCAADVWYGSTWRNWG |
| | | QGTQVTVSS |
| TIGIT-30-5 | 1418 | EVQLVESGGGLVQAGGSLRLSCAASGGTFRNYGMGWFRQAPGKERELVAAISWSG |
| | | VSTIYADSVKGRFTISADNAKNTVYLQMNSLKPEDTAVYYCASSPYGPLYRSTHYYD |
| | | WGQGTQVTVSS |
| TIGIT-30-6 | 1419 | EVQLVESGGGLVQAGGSLRLSCAASGRFSRINSMGWFRQAPGKERELVAHIFRSGITS |
| | | YASYADSVKGRFTISADNAKNTVYLQMNSLKPEDTAVYYCAIGRGSWGQGTQVTV |
| | | SS |
| TIGIT-30-7 | 1420 | EVQLVESGGGLVQAGGSLRLSCAASGIPASIRTMGWFRQAPGKEREGISLITSDDGST |
| | | YYADSVKGRFTISADNAKNTVYLQMNSLKPEDTAVYYCAWTTNRGMDWGQGTQV |
| | | TVSS |
| TIGIT-30-8 | 1421 | EVQLVESGGGLVQAGGSLRLSCAASGFTMSSSWMGWFRQAPGKEREFVATLTSGGS |
| | | TNYADSVKGRFTISADNAKNTVYLQMNSLKPEDTAVYYCAADVWYGSTWRNWGQ |
| | | GTQVTVSS |
| TIGIT-30-9 | 1422 | EVQLVESGGGLVQAGGSLRLSCAASGPISGINRMGWFRQAPGKEREWVSTITFNGDH |
| | | TYYADSVKGRFTISADNAKNTVYLQMNSLKPEDTAVYYCAARPYTRPGSMWVSSL |
| | | YDWGQGTQVTVSS |
| TIGIT-30-10 | 1423 | EVQLVESGGGLVQAGGSLRLSCAASVRTFSLSDMGWFRQAPGKEREFVGAINWLSE |
| | | STYYADSVKGRFTISADNAKNTVYLQMNSLKPEDTAVYYCAAQGGVLSGWDWGQ |
| | | GTQVTVSS |
| TIGIT-30-11 | 1424 | EVQLVESGGGLVQAGGSLRLSCAASGSITSIRSMGWFRQAPGKEREWVSSVYIFGGS |
| | | TYYADSVKGRFTISADNAKNTVYLQMNSLKPEDTAVYYCANSNKPKFDWGQGTQV |
| | | TVSS |
| TIGIT-30-12 | 1425 | EVQLVESGGGLVQAGGSLRLSCAASGRTFGDYIMGWFRQAPGKERELVASVSGGGN |
| | | SDYADSVKGRFTISADNAKNTVYLQMNSLKPEDTAVYYCAAVFSRGPLTWGQGTQ |
| | | VTVSS |
| TIGIT-30-13 | 1426 | EVQLVESGGGLVQAGGSLRLSCAASGRTFSNYFMGWFRQAPGKERESVAAINWDSA |
| | | RTYYADSVKGRFTISADNAKNTVYLQMNSLKPEDTAVYYCASAGRWGQGTQVTVS |
| | | S |
| TIGIT-30-14 | 1427 | EVQLVESGGGLVQAGGSLRLSCAASGPTFSIYDMGWFRQAPGKEREFVAAITWNSG |
| | | RTNYADSVKGRFTISADNAKNTVYLQMNSLKPEDTAVYYCAAGAWSSLRKTAASW |
| | | GQGTQVTVSS |
| TIGIT-30-15 | 1428 | EVQLVESGGGLVQAGGSLRLSCAASGFTFSGNWMGWFRQAPGKEREWVSGISSGG |
| | | GRTYYADSVKGRFTISADNAKNTVYLQMNSLKPEDTAVYYCAADVWYGSTWRNW |
| | | GQGTQVTVSS |
| TIGIT-30-16 | 1429 | EVQLVESGGGLVQAGGSLRLSCAASGFPFSEYPMGWFRQAPGKEREFVAVVNWNG |
| | | DSTYYADSVKGRFTISADNAKNTVYLQMNSLKPEDTAVYYCANFNRDWGQGTQVT |
| | | VSS |
| TIGIT-30-17 | 1430 | EVQLVESGGGLVQAGGSLRLSCAASGSIFNIGMGWFRQAPGKEREWVSSIYSNGHTY |
| | | YADSVKGRFTISADNAKNTVYLQMNSLKPEDTAVYYCANSNKPKFDWGQGTQVTV |
| | | SS |
| TIGIT-30-18 | 1431 | EVQLVESGGGLVQAGGSLRLSCAASGRAFSLRTMGWFRQAPGKEREGISLITSDDGS |
| | | TYYADSVKGRFTISADNAKNTVYLQMNSLKPEDTAVYYCAWTTNRGMDWGQGTQ |
| | | VTVSS |
| TIGIT-30-19 | 1432 | EVQLVESGGGLVQAGGSLRLSCAASGRTFSSYAMMGWFRQAPGKEREFLAIITDGSK |
| | | TLYADSVKGRFTISADNAKNTVYLQMNSLKPEDTAVYYCAAQFTLARHLVWGQGT |
| | | QVTVSS |
| TIGIT-30-20 | 1433 | EVQLVESGGGLVQAGGSLRLSCAASGPTFSIYDMGWFRQAPGKEREFVAVINWSRG |
| | | STFYADSVKGRFTISADNAKNTVYLQMNSLKPEDTAVYYCAAGVWSSLRHTAANW |
| | | GQGTQVTVSS |
| TIGIT-30-21 | 1434 | EVQLVESGGGLVQAGGSLRLSCAASGFTFSTSWMGWFRQAPGKERELVATINSGGG |
| | | TNYADSVKGRFTISADNAKNTVYLQMNSLKPEDTAVYYCAADVWYGSTWRNWGQ |
| | | GTQVTVSS |
| TIGIT-30-22 | 1435 | EVQLVESGGGLVQAGGSLRLSCAASGFTLSGNWMGWFRQAPGKEREFVASISSSGV |
| | | SKHYADSVKGRFTISADNAKNTVYLQMNSLKPEDTAVYYCAADVWYGSTWRNWG |
| | | RGTQVTVSS |
| TIGIT-30-23 | 1436 | EVQLVESGGGLVQAGGSLRLSCAASGRAFRRYTMGWFRQAPGKEREFVAAIRWSG |
| | | GTTFYADSVKGRFTISADNAKNTVYLQMNSLKPEDTAVYYCAAEWAAMKDWGQG |
| | | TQVTVSS |
| TIGIT-30-24 | 1437 | EVQLVESGGGLVQAGGSLRLSCAASGNIFSRYIMGWFRQAPGKEREWVAGISNGGT |
| | | TKYADSVKGRFTISADNAKNTVYLQMNSLKPEDTAVYYCAQGWKIIPTDWGQGTQ |
| | | VTVSS |
| TIGIT-30-25 | 1438 | EVQLVESGGGLVQAGGSLRLSCAASGPTFSIYDMGWFRQAPGKEREFVASTIWSRGD |
| | | TYYADSVKGRFTISADNAKNTVYLQMNSLKPEDTAVYYCAAGVWSSLRHTAANWG |
| | | QGTQVTVSS |
| TIGIT-30-26 | 1439 | EVQLVESGGGLVQAGGSLRLSCAASGRTYYAMGWFRQAPGKEREFLAIITDGSKTL |
| | | YADSVKGRFTISADNAKNTVYLQMNSLKPEDTAVYYCAAQFTLARHLVWGQGTQV |
| | | TVSS |
| TIGIT-30-27 | 1440 | EVQLVESGGGLVQAGGSLRLSCAASGFTFSTSWMGWFRQAPGKEREFVAGILSDGR |
| | | ELYADSVKGRFTISADNAKNTVYLQMNSLKPEDTAVYYCAADVWYGSTWRNWGQ |
| | | GTQVTVSS |
| TIGIT-30-28 | 1441 | EVQLVESGGGLVQAGGSLRLSCAASGRTFESYRMGWFRQAPGKEREFVGGINWSGR |
| | | TYYADSVKGRFTISADNAKNTVYLQMNSLKPEDTAVYYCAARRLYSGSYLDWGQG |
| | | TQVTVSS |
| TIGIT-30-29 | 1442 | EVQLVESGGGLVQAGGSLRLSCAASGSSLSFNAMGWFRQAPGKEREWVSSVYIFGG |
| | | STYYADSVKGRFTISADNAKNTVYLQMNSLKPEDTAVYYCANSNKPKFDWGQGTQ |
| | | VTVSS |
| TIGIT-30-30 | 1443 | EVQLVESGGGLVQAGGSLRLSCAASGGTFSGRGMGWFRQAPGKEREWVSSVYIFGG |
| | | STYYADSVKGRFTISADNAKNTVYLQMNSLKPEDTAVYYCANSNKPKFDWGQGTQ |
| | | VTVSS |
| TIGIT-30-31 | 1444 | EVQLVESGGGLVQAGGSLRLSCAASGPTFSWTMMGWFRQAPGKEREFLAIITDGSK |
| | | TLYADSVKGRFTISADNAKNTVYLQMNSLKPEDTAVYYCAAQFTLARHLVWGQGT |
| | | QVTVSS |
| TIGIT-30-32 | 1445 | EVQLVESGGGLVQAGGSLRLSCAASGIIGTIRTMGWFRQAPGKEREGISLITSDDGST |
| | | YYADSVKGRFTISADNAKNTVYLQMNSLKPEDTAVYYCAWTTNRGMDWGQGTQV |
| | | TVSS |
| TIGIT-30-33 | 1446 | EVQLVESGGGLVQAGGSLRLSCAASGFTLENNMMGWFRQAPGKERELVSAIGWSG |
| | | ASTYYADSVKGRFTISADNAKNTVYLQMNSLKPEDTAVYYCAANLRGDNWGQGTQ |
| | | VTVSS |
| TIGIT-30-34 | 1447 | EVQLVESGGGLVQAGGSLRLSCAASGNIFSRYIMGWFRQAPGKEREWVAGISSGGTT |
| | | KYADSVKGRFTISADNAKNTVYLQMNSLKPEDTAVYYCAQGWKIVPTNWGQGTQV |
| | | TVSS |
| TIGIT-30-35 | 1448 | EVQLVESGGGLVQAGGSLRLSCAASGNIDRLYAMGWFRQAPGKEREGISLITSDDGS |
| | | TYYADSVKGRFTISADNAKNTVYLQMNSLKPEDTAVYYCASSGPADARNGERWAW |
| | | GQGTQVTVSS |
| TIGIT-30-36 | 1449 | EVQLVESGGGLVQAGGSLRLSCAASGSIASIHAIGWFRQAPGKEREWVSSVYIFGGST |
| | | YYADSVKGRFTISADNAKNTVYLQMNSLKPEDTAVYYCANSNKPKFDWGQGTQVT |
| | | VSS |
| TIGIT-30-37 | 1450 | EVQLVESGGGLVQAGGSLRLSCAASGRTFSSKAMGWFRQAPGKEREWVSSVYIFGG |
| | | STYYADSVKGRFTISADNAKNTVYLQMNSLKPEDTAVYYCANSNKPKFDWGQGTQ |
| | | VTVSS |
| TIGIT-30-38 | 1451 | EVQLVESGGGLVQAGGSLRLSCAASGSIASFNAMGWFRQAPGKEREWVSSVYIFGG |
| | | STYYADSVKGRFTISADNAKNTVYLQMNSLKPEDTAVYYCANSNKPKFDWGQGTQ |
| | | VTVSS |
| TIGIT-30-39 | 1452 | EVQLVESGGGLVQAGGSLRLSCAASGFTFSTSWMGWFRQAPGKEREWVVGISSGGS |
| | | THYADSVKGRFTISADNAKNTVYLQMNSLKPEDTAVYYCAADVWYGSTWRNWGQ |
| | | GTQVTVSS |
| TIGIT-30-40 | 1453 | EVQLVESGGGLVQAGGSLRLSCAASGFTFSGNWMGWFRQAPGKEREWVVGISSGG |
| | | STHYADSVKGRFTISADNAKNTVYLQMNSLKPEDTAVYYCAADVWYGSTWRNWG |
| | | QGTQVTVSS |
| TIGIT-30-41 | 1454 | EVQLVESGGGLVQAGGSLRLSCAASGRTFSSYAMMGWFRQAPGKEREFLAIITDGSK |
| | | TLYADSVKGRFTISADNAKNTVYLQMNSLKPEDTAVYYCAAQFILARHLVWGQGT |
| | | QVTVSS |
| TIGIT-30-42 | 1455 | EVQLVESGGGLVQAGGSLRLSCAASGITITTEVMGWFRQAPGKEREYVAAIHWNGD |
| | | STAYADSVKGRFTISADNAKNTVYLQMNSLKPEDTAVYYCAQVSQWRAWGQGTQ |
| | | VTVSS |
| TIGIT-30-43 | 1456 | EVQLVESGGGLVQAGGSLRLSCAASGFTFSTSWMGWFRQAPGKERELVAARNSGG |
| | | NTNYADSVKGRFTISADNAKNTVYLQMNSLKPEDTAVYYCAADVWYGSTWRNWG |
| | | QGTQVTVSS |
| TIGIT-30-44 | 1457 | EVQLVESGGGLVQAGGSLRLSCAASGVTLDLYAMGWFRQAPGKEREFVAGIWRSG |
| | | GSTVYADSVKGRFTISADNAKNTVYLQMNSLKPEDTAVYYCATWTTTWGRNRDW |
| | | GQGTQVTVSS |
| TIGIT-30-45 | 1458 | EVQLVESGGGLVQAGGSLRLSCAASGGTFSGGFMGWFRQAPGKEREWVASVLRGG |
| | | YTWYADSVKGRFTISADNAKNTVYLQMNSLKPEDTAVYYCANGGSSYWGQGTQV |
| | | TVSS |
| TIGIT-30-46 | 1459 | EVQLVESGGGLVQAGGSLRLSCAASGRTFSTYASMWWFRQAPGKEREFLAIITDGSK |
| | | TLYADSVKGRFTISADNAKNTVYLQMNSLKPEDTAVYYCAGSWSYPGLTWGQGTQ |
| | | VTVSS |
| TIGIT-30-47 | 1460 | EVQLVESGGGLVQAGGSLRLSCAASGFTMSSSWMGWFRQAPGKEREWVVGISSGG |
| | | STHYADSVKGRFTISADNAKNTVYLQMNSLKPEDTAVYYCAADVWYGSTWRNWG |
| | | QGTQVTVSS |
| TIGIT-30-48 | 1461 | EVQLVESGGGLVQAGGSLRLSCAASGFPVNRYSMGWFRQAPGKERELVSAIGWSGA |
| | | STYYADSVKGRFTISADNAKNTVYLQMNSLKPEDTAVYYCAADFWLARLRVADDY |
| | | DWGQGTQVTVSS |
| TIGIT-30-49 | 1462 | EVQLVESGGGLVQAGGSLRLSCAASGNIFSRYIMGWFRQAPGKEREWVAGISNGGT |
| | | TKYADSVKGRFTISADNAKNTVYLQMNSLKPEDTAVYYCAQGWKIVPTNWGQGTQ |
| | | VTVSS |
| TIGIT-30-50 | 1463 | EVQLVESGGGLVQAGGSLRLSCAASGRSFSNYVMGWFRQAPGKERERVATITSGGL |
| | | TVYADSVKGRFTISADNAKNTVYLQMNSLKPEDTAVYYCALYRVNWGQGTQVTVS |
| | | S |
| TIGIT-30-51 | 1464 | EVQLVESGGGLVQAGGSLRLSCAASGSIFSISDMGWFRQAPGKEREFVGAINWLSES |
| | | TYYADSVKGRFTISADNAKNTVYLQMNSLKPEDTAVYYCAAQGGVLSGWDWGQG |
| | | TQVTVSS |
| TIGIT-30-52 | 1465 | EVQLVESGGGLVQAGGSLRLSCAASGRTFSNYFMGWFRQAPGKERESVATVTWRD |
| | | NITYYADSVKGRFTISADNAKNTVYLQMNSLKPEDTAVYYCASAGRWGQGTQVTV |
| | | SS |
| TIGIT-30-53 | 1466 | EVQLVESGGGLVQAGGSLRLSCAASGLTFSNYVMGWFRQAPGKERESVAAINWDS |
| | | ARTYYADSVKGRFTISADNAKNTVYLQMNSLKPEDTAVYYCASAGRWGQGTQVTV |
| | | SS |
| TIGIT-30-54 | 1467 | EVQLVESGGGLVQAGGSLRLSCAASGFTFRSFGMGWFRQAPGKEREFVASTIWSRG |
| | | DTYYADSVKGRFTISADNAKNTVYLQMNSLKPEDTAVYYCASSPYGPLYRSTHYYD |
| | | WGQGTQVTVSS |
| TIGIT-30-55 | 1468 | EVQLVESGGGLVQAGGSLRLSCAASGNTFSGGFMGWFRQAPGKEREWVASVLRGG |
| | | YTWYADSVKGRFTISADNAKNTVYLQMNSLKPEDTAVYYCATGWQSTTKSQGWG |
| | | QGTQVTVSS |
| TIGIT-30-56 | 1469 | EVQLVESGGGLVQAGGSLRLSCAASGLTISTYPMGWFRQAPGKEREFVAAVNWSGR |
| | | RELYADSVKGRFTISADNAKNTVYLQMNSLKPEDTAVYYCAAFREYHWGQGTQVT |
| | | VSS |
| TIGIT-30-57 | 1470 | EVQLVESGGGLVQAGGSLRLSCAASGPTFSIYDMGWFRQAPGKEREFVAAITWNSG |
| | | RIGYADSVKGRFTISADNAKNTVYLQMNSLKPEDTAVYYCAAGVWSSLRHTAANW |
| | | GQGTQVTVSS |
| TIGIT-30-58 | 1471 | EVQLVESGGGLVQAGGSLRLSCAASGFAFGDSWMGWFRQAPGKEREWVSGISSGG |
| | | GRTYYADSVKGRFTISADNAKNTVYLQMNSLKPEDTAVYYCAADVWYGSTWRNW |
| | | GQGTQVTVSS |
| TIGIT-31-01 | 1472 | EVQLVESGGGLVQPGGSLRLSCAASGFTFDRSWMGWFRQAPGKEREVVASITSGGS |
| | | TYYADSVKGRFTISADNSKNTAYLQMNSLKPEDTAVYYCAADVWYGSTWRNWGQ |
| | | GTLVTVSS |
| TIGIT-31-02 | 1473 | EVQLVESGGGLVQPGGSLRLSCAASGRTFGDYIMGWFRQAPGKERELVAEITRSGRT |
| | | NYADSVKGRFTISADNSKNTAYLQMNSLKPEDTAVYYCAAVFSRGPLTWGQGTLVT |
| | | VSS |
| TIGIT-31-03 | 1474 | EVQLVESGGGLVQPGGSLRLSCAASGFTFSGNWMGWFRQAPGKEREFVASISSSGIS |
| | | TYYADSVKGRFTISADNSKNTAYLQMNSLKPEDTAVYYCAADVWYGSTWRNWGQ |
| | | GTLVTVSS |
| TIGIT-31-04 | 1475 | EVQLVESGGGLVQPGGSLRLSCAASGFPVNRYWMGWFRQAPGKERELVATITSGGS |
| | | TNYADSVKGRFTISADNSKNTAYLQMNSLKPEDTAVYYCAADVWYGSTWRNWGQ |
| | | GTLVTVSS |
| TIGIT-31-05 | 1476 | EVQLVESGGGLVQPGGSLRLSCAASGRTFGDYIMGWFRQAPGKEREFVATISRGGGS |
| | | TYVDSVKGRFTISADNSKNTAYLQMNSLKPEDTAVYYCAAVFSRGPLTWGQGTLVT |
| | | VSS |
| TIGIT-31-06 | 1477 | EVQLVESGGGLVQPGGSLRLSCAASGFTFSTSWMGWFRQAPGKERELVASITSGGST |
| | | YYADSVKGRFTISADNSKNTAYLQMNSLKPEDTAVYYCAADVWYGSTWRNWGQG |
| | | TLVTVSS |
| TIGIT-31-7 | 1478 | EVQLVESGGGLVQPGGSLRLSCAASGSTFSINRMGWFRQAPGKEREWVATIVHSGG |
| | | HSGGTSYYADSVKGRFTISADNSKNTAYLQMNSLKPEDTAVYYCAARPYTRPGSM |
| | | WVSSLYDWGQGTLVTVSS |
| TIGIT-31-08 | 1479 | EVQLVESGGGLVQPGGSLRLSCAASGFTFSTSWMGWFRQAPGKERELVAARNSGGN |
| | | TNYADSVKGRFTISADNSKNTAYLQMNSLKPEDTAVYYCAADVWYGSTWRNWGQ |
| | | GTLVTVSS |
| TIGIT-31-9 | 1480 | EVQLVESGGGLVQPGGSLRLSCAASGGTLSGNAMGWFRQAPGKEREWVASIYWSS |
| | | GNTYYADSVKGRFTISADNSKNTAYLQMNSLKPEDTAVYYCANSNKPKFDWGQGT |
| | | LVTVSS |
| TIGIT-31-10 | 1481 | EVQLVESGGGLVQPGGSLRLSCAASGHTFSSYGMGWFRQAPGKERELVAAISWSGIS |
| | | TIYADSVKGRFTISADNSKNTAYLQMNSLKPEDTAVYYCASSPYGPLYRSTHYYDW |
| | | GQGTLVTVSS |
| TIGIT-31-11 | 1482 | EVQLVESGGGLVQPGGSLRLSCAASGFTFSTSWMGWFRQAPGKEREFVASISTSGNT |
| | | FYADSVKGRFTISADNSKNTAYLQMNSLKPEDTAVYYCAADVWYGSTWRNWGQG |
| | | TLVTVSS |
| TIGIT-31-12 | 1483 | EVQLVESGGGLVQPGGSLRLSCAASGFTFSRYWMGWFRQAPGKEREAVASITSGGS |
| | | TYYADSVKGRFTISADNSKNTAYLQMNSLKPEDTAVYYCAADVWYGSTWRNWGQ |
| | | GTLVTVSS |
| TIGIT-31-13 | 1484 | EVQLVESGGGLVQPGGSLRLSCAASGFTFDRSWMGWFRQAPGKEREWVASITSGGT |
| | | TNYADSVKGRFTISADNSKNTAYLQMNSLKPEDTAVYYCAADVWYGSTWRNWGQ |
| | | GTLVTVSS |
| TIGIT-31-14 | 1485 | EVQLVESGGGLVQPGGSLRLSCAASGYTFRAYVMGWFRQAPGKERELVAVINYRGS |
| | | SLKYADSVKGRFTISADNSKNTAYLQMNSLKPEDTAVYYCAASEWGGSDYDHDYD |
| | | WGQGTLVTVSS |
| TIGIT-31-15 | 1486 | EVQLVESGGGLVQPGGSLRLSCAASGFTFSTYGMGWFRQAPGKEREFVAAISWSGV |
| | | SKHYADSVKGRFTISADNSKNTAYLQMNSLKPEDTAVYYCASSPYGPLYRSTHYYD |
| | | WGQGTLVTVSS |
| TIGIT-31-16 | 1487 | EVQLVESGGGLVQPGGSLRLSCAASGFTFSTSWMGWFRQAPGKERELVVSVTSGGY |
| | | TNYADSVKGRFTISADNSKNTAYLQMNSLKPEDTAVYYCAADVWYGSTWRNWGQ |
| | | GTLVTVSS |
| TIGIT-31-17 | 1488 | EVQLVESGGGLVQPGGSLRLSCAASGFTMSSSWMGWFRQAPGKEREWVASINSGGT |
| | | RNYADSVKGRFTISADNSKNTAYLQMNSLKPEDTAVYYCAADVWYGSTWRNWGQ |
| | | GTLVTVSS |
| TIGIT-31-18 | 1489 | EVQLVESGGGLVQPGGSLRLSCAASGFTFSGNWMGWFRQAPGKEREFVASISSGSAI |
| | | NYADSVKGRFTISADNSKNTAYLQMNSLKPEDTAVYYCAADVWYGSTWRNWGQG |
| | | TLVTVSS |
| TIGIT-31-19 | 1490 | EVQLVESGGGLVQPGGSLRLSCAASGRTFGNYAMGWFRQAPGKEREFVADIRSSAG |
| | | RTYYADSVKGRFTISADNSKNTAYLQMNSLKPEDTAVYYCAASEWGGSDYDHDYD |
| | | WGQGTLVTVSS |
| TIGIT-31-20 | 1491 | EVQLVESGGGLVQPGGSLRLSCAASGFTFSGNWMGWFRQAPGKEREFVAGILSDGR |
| | | ELYADSVKGRFTISADNSKNTAYLQMNSLKPEDTAVYYCAADVWYGSTWRNWGQ |
| | | GTLVTVSS |
| TIGIT-31-21 | 1492 | EVQLVESGGGLVQPGGSLRLSCAASGFTLSGNWMGWFRQAPGKEREFVASISSSGIS |
| | | TYYADSVKGRFIISADNSKNTAYLQMNSLKPEDTAVYYCAADVWYGSTWRNWGQ |
| | | GTLVTVSS |
| TIGIT-31-22 | 1493 | EVQLVESGGGLVQPGGSLRLSCAASGRTFSTHAMGWFRQAPGKEREFVAAITPINW |
| | | GGRGTHYADSVKGRFTISADNSKNTAYLQMNSLKPEDNAVYYCAAKRLRSGRWTW |
| | | GQGTLVTVSS |
| TIGIT-31-23 | 1494 | EVQLVESGGGLVQPGGSLRLSCAASGFTFSNSGMGWFRQAPGKEREWVASIYWSSG |
| | | NTYYADSVKGRFTISADNSKNTAYLQMNSLKPEDTAVYYCANSNKPKFDWGQGTL |
| | | VTVSS |
| TIGIT-31-24 | 1495 | EVQLVESGGGLVQPGGSLRLSCAASGRTFSMGWFRQAPGKEREFVATVRWGTSSTY |
| | | YADSVKGRFTISADNSKNTAYLQMNSLKPEDTAVYYCAAETFGSGSSLMSEYDWGQ |
| | | GTLVTVSS |
| TIGIT-31-25 | 1496 | EVQLVESGGGLVQPGGSLRLSCAASGNIFSRYIMGWFRQAPGKEREWVAGISNGGTT |
| | | KYADSVKGRFTISADNSKNTAYLQMNSLKPEDTAVYYCAQGWKIVPTNWGQGTLV |
| | | TVSS |
| TIGIT-31-26 | 1497 | EVQLVESGGGLVQPGGSLRLSCAASGFTFDRSWMGWFRQAPGKERELVAAITSGGS |
| | | TYYADSVKGRFTISADNSKNTAYLQMNSLKPEDTAVYYCAADVWYGSTWRNWGQ |
| | | GTLVTVSS |
| TIGIT-31-27 | 1498 | EVQLVESGGGLVQPGGSLRLSCAASGFTFGHYAMGWFRQAPGKEREFVAAISWSGV |
| | | STYYADSVKGRFTISADNSKNTAYLQMNSLKPEDTAVYYCASSPYGPLYRSTHYYD |
| | | WGQGTLVTVSS |
| TIGIT-31-28 | 1499 | EVQLVESGGGLVQPGGSLRLSCAASGRTFSSYHMGWFRQAPGKERELVALISRVGV |
| | | TSYADSVKGRFTISADNSKNTAYLQMNSLKPEDTAVYYCAAVRTYGSATYDWGQG |
| | | TLVTVSS |
| TIGIT-31-29 | 1500 | EVQLVESGGGLVQPGGSLRLSCAASGRSRMGWFRQAPGKEREFVATISWSGSAVYA |
| | | DSVKGRFTISADNSKNTAYLQMNSLKPEDTAVYYCAAGGRYSARVWGQGTLVTVS |
| | | S |
| TIGIT-31-30 | 1501 | EVQLVESGGGLVQPGGSLRLSCAASGRTYNMGWFRQAPGKEREWVATIYSRSGGST |
| | | TYYADSVKGRFTISADNSKNTAYLQMNSLKPEDTAVYYCATYGYDSGRYYSWGQG |
| | | TLVTVSS |
| TIGIT-31-31 | 1502 | EVQLVESGGGLVQPGGSLRLSCAASGFTLSGNWMGWFRQAPGKEREFVASISSGGG |
| | | TNYADSVKGRFTISADNSKNTAYLQMNSLKPEDTAVYYCAADVWYGSTWRNWGQ |
| | | GTLVTVSS |
| TIGIT-31-32 | 1503 | EVQLVESGGGLVQPGGSLRLSCAASGFTFSTSWMGWFRQAPGKERELVAAMTSGG |
| | | GTNYADSVKGRFTISADNSKNTAYLQMNSLKPEDTAVYYCAADVWYGSTWRNWG |
| | | QGTLVTVSS |
| TIGIT-31-33 | 1504 | EVQLVESGGGLVQPGGSLRLSCAASGFTFSTSWMGWFRQAPGKERELVASITSGGST |
| | | NYADSVKGRFTISADNSKNTAYLQMNSLKPEDTAVYYCAADVWYGSTWRNWGQG |
| | | TLVTVSS |
| TIGIT-31-34 | 1505 | EVQLVESGGGLVQPGGSLRLSCAASGRSRYGMGWFRQAPGKEREFVSAISWSGISTY |
| | | YADSVKGRFTISADNSKNTAYLQMNSLKPEDTAVYYCAATQWGSSGWKQARWYD |
| | | WGQGTLVTVSS |
| TIGIT-31-35 | 1506 | EVQLVESGGGLVQPGGSLRLSCAASGFTFSTSWMGWFRQAPGKERELVASITSGGTT |
| | | NYADSVKGRFTISADNSKNTAYLQMNSLKPEDTAVYYCAADVWYGSTWRNWGQG |
| | | TLVTVSS |
| TIGIT-31-36 | 1507 | EVQLVESGGGLVQPGGSLRLSCAASGFTFDRSWMGWFRQAPGKERELVASVTSGGT |
| | | TNYADSVKGRFTISADNSKNTAYLQMNSLKPEDTAVYYCAADVWYGSTWRNWGQ |
| | | GTLVTVSS |
| TIGIT-31-37 | 1508 | EVQLVESGGGLVQPGGSLRLSCAASGSIFSINSMGWFRQAPGKEREFVAALSWIIGST |
| | | YYADSVKGRFTISADNSKNTAYLQMNSLKPEDTAVYYCAVNGRWRSWSSQRDWG |
| | | QGTLVTVSS |
| TIGIT-31-38 | 1509 | EVQLVESGGGLVQPGGSLRLSCAASGFTFDRSWMGWFRQAPGKERELVASITSGGST |
| | | SYADSVKGRFTISADNSKNTAYLQMNSLKPEDTAVYYCAADVWYGSTWRNWGQG |
| | | TLVTVSS |
| TIGIT-31-39 | 1510 | EVQLVESGGGLVQPGGSLRLSCAASGFTFSTSWMGWFRQAPGKERELVAGVNSNGY |
| | | INYADSVKGRFTISADNSKNTAYLQMNSLKPEDTAVYYCAADVWYGSTWRNWGQ |
| | | GTLVTVSS |
| TIGIT-31-40 | 1511 | EVQLVESGGGLVQPGGSLRLSCAASGSTLRDYVMGWFRQAPGKERELVSSISRSGTT |
| | | MFADSVKGRFTIIADNSKNTAYLLMNSLKPQDTAVYYCAAVFSRGLLTCGQGTLVT |
| | | VSS |
| TIGIT-31-41 | 1512 | EVQLVESGGGLVQPGGSLRLSCAASGGTLSSYIMGWFRQAPGKEREFVAAISGWSG |
| | | GTTNYADSVKGRFTISADNSKNTAYLQMNSLKPEDTAVYYCAAARFAPGSRGYDW |
| | | GQGTLVTVSS |
| TIGIT-31-42 | 1513 | EVQLVESGGGLVQPGGSLRLSCAASGFTFSTHWMGWFRQAPGKEREFVASIGSSGTT |
| | | RYADSVKGRFTISADNSKNTAYLQMNSLKPEDTAVYYCAADVWYGSTWRNWGQG |
| | | TLVTVSS |
| TIGIT-31-43 | 1514 | EVQLVESGGGLVQPGGSLRLSCAASGGTFSAFPMGWFRQAPGKERELVAAISSGGTT |
| | | YYADSVKGRFTISADNSKNTAYLQMNSLKPEDTAVYYCAAQGGVLSAWDWGQGT |
| | | LLTVSS |
| TIGIT-31-44 | 1515 | EVQLVESGGGLVQPGGSLRLSCAASGFTFSGNWMGWFRQAPGKEREWVASISSGGT |
| | | TNYADSVKGRFTISADNSKNTAYLQMNSLKPEDTAVYYCAADVWYGSTWRNWGQ |
| | | GTLVTVSS |
| TIGIT-31-45 | 1516 | EVQLVESGGGLVQPGGSLRLSCAASGFTFSGNWMGWFRQAPGKEREFVAGVNSNG |
| | | YINYADSVKGRFTISADNSKNTAYLQMNSLKPEDTAVYYCAADVWYGSTWRNWG |
| | | QGTLVTVSS |
| TIGIT-31-46 | 1517 | EVQLVESGGGLVQPGGSLRLSCAASGFTFDRSWMGWFRQAPGKERELVASITSGGT |
| | | TSYADSVKGRFTISADNSKNTAYLQMNSLKPEDTAVYYCAADVWYGSTWRNWGQ |
| | | GTLVTVSS |
| TIGIT-31-47 | 1518 | EVQLVESGGGLVQPGGSLRLSCAASGFTFSGNWMGWFRQAPGKEREWVVGISSGGT |
| | | PHYADSVKGRFTISADNSKNTAYLQMNSLKPEDTAVYYCAADVWYGSTWRNWGQ |
| | | GTLVTVSS |
| TIGIT-31-48 | 1519 | EVQLVESGGGLVQPGGSLRLSCAASGFTLSSNWMGWFRQAPGKERELVAGVNSNG |
| | | YINYADSVKGRFTISADNSKNTAYLQMNSLKPEDTAVYYCAADVWYGSTWRNWG |
| | | QGTLVTVSS |
| TIGIT-31-49 | 1520 | EVQLVESGGGLVQPGGSLRLSCAASGFDFSVSWMGWFRQAPGKERELVARISSGGE |
| | | LPYYADSVKGRFTISADNSKNTAYLQMNSLKPKHTAVYYCAARPNTRPGSMWGQG |
| | | TLVTVSS |
| TIGIT-31-50 | 1521 | EVQLVESGGGLVQPGGSLRLSCAASGFTMSSSWMGWFRQAPGKEREFVGGISSGGS |
| | | TYYADSVKGRFTISADNSKNTAYLQMNSLKPEDTAVYYCAADVWYGSTWRNWGQ |
| | | GTLVTVSS |
| TIGIT-31-51 | 1522 | EVQLVESGGGLVQPGGSLRLSCAASGRNFRRNSMGWFRQAPGKEREFVAVITRSGG |
| | | GEVTTYADSVKGRFTISADNSKNTAYLQMNSLKPEDTAVYYCAMSSVTRGSSDWG |
| | | QGTLVTVSS |
| TIGIT-31-52 | 1523 | EVQLVESGGGLVQPGGSLRLSCAASGFTFDRSWMGWFRQAPGKEREFVAGITSSGIP |
| | | NYADSVKGRFTISADNSKNTAYLQMNSLKPEDTAVYYCAADVWYGSTWRNWGQG |
| | | TLVTVSS |
| TIGIT-31-53 | 1524 | EVQLVESGGGLVQPGGSLRLSCAASGLTISTYNMGWFRQAPGKERELVSAIGWSGAS |
| | | TYYADSVKGRFTISADNSKNTAYLQMNSLKPEDTAVYYCAAFRGRMYDWGQGTLV |
| | | TVSS |
| TIGIT-31-54 | 1525 | EVQLVESGGGLVQPGGSLRLSCAASGFTFSTSWMGWFRQAPGKERELVAAVTSGGN |
| | | TNYADSVKGRFTISADNSKNTAYLQMNSLKPEDTAVYYCAADVWYGSTWRNWGQ |
| | | GTLVTVSS |
| TIGIT-31-55 | 1526 | EVQLVESGGGLVQPGGSLRLSCAASGRTFGDYIMGWFRQAPGKERELVAEITRVGN |
| | | TNYADSVKGRFTISADNSKNTAYLQMNSLKPEDTAVYYCAAVFSRGPLTWGQGTLV |
| | | TVSS |
| TIGIT-31-56 | 1527 | EVQLVESGGGLVQPGGSLRLSCAASGRIFRRNSMGWFRQAPGKEREFVAVITRSGGG |
| | | EVTTYADSVKGRFTINADNSKNTAYLQMNSLKPEDTAVYYCAMSSVTRGSSDWGQ |
| | | GTLVTVST |
| TIGIT-269-1 | 1528 | QVQLVQSGAEVKKPGSSVKVSCKASGGIFSSYAISWVRQAPGQGLEWMGGIIPTNYA |
| | | QKFQGRVTITADESTSTAYMELSSLRSEDTAVYYCARWRGGLSAFDVWGQGTLVTV |
| | | SS |
| TIGIT-269-2 | 1529 | QVQLVQSGAEVKKPGSSVKVSCKASGGTYTTHGISWVRQAPGQGLEWMGGIIPINY |
| | | AQKFQGRVTITADESTSTAYMELSSLRSEDTAVYYCARAFGLASGKGPGVFDYWGQ |
| | | GTLVTVSS |
| TIGIT-269-3 | 1530 | EVQLLESGGGLVQPGGSLRLSCAASGFSFGSYAMSWVRQAPGKGLEWVSAITGSYY |
| | | ADSVKGRFTISRDNSKNTLYLQMNSLRAEDTAVYYCARVLGNSGRGLDYWGQGTL |
| | | VTVSS |
| TIGIT-269-4 | 1531 | QVQLVQSGAEVKKPGSSVKVSCKASGGPFNKYAISWVRQAPGQGLEWMGGIIPMN |
| | | YAQKFQGRVTITADESTSTAYMELSSLRSEDTAVYYCARGSHQLYYAFEYWGQGTL |
| | | VTVSS |
| TIGIT-269-5 | 1532 | EVQLLESGGGLVQPGGSLRLSCAASGFTFSTYLMIWVRQAPGKGLEWVSAISGSYYA |
| | | DSVKGRFTISRDNSKNTLYLQMNSLRAEDTAVYYCARDVEGQVGHFFDPWGQGTL |
| | | VTVSS |
| TIGIT-269-6 | 1533 | EVQLLESGGGLVQPGGSLRLSCAASGFTLSSYSMSWVRQAPGKGLEWVSAINPSYY |
| | | ADSVKGRFTISRDNSKNTLYLQMNSLRAEDTAVYYCAKGIKAFGGTRLPLYFDSWG |
| | | QGTLVTVSS |
| TIGIT-269-7 | 1534 | EVQLLESGGGLVQPGGSLRLSCAASGFTFGNYAMSWVRQAPGKGLEWVSAITGSYY |
| | | ADSVKGRFTISRDNSKNTLYLQMNSLRAEDTAVYYCAKHLLSRSRGLDVWGQGTLV |
| | | TVSS |
| TIGIT-269-8 | 1535 | EVQLLESGGGLVQPGGSLRLSCAASGFTFGTYSMSWVRQAPGKGLEWVSAITGSYY |
| | | ADSVKGRFTISRDNSKNTLYLQMNSLRAEDTAVYYCAKHLLARSGGMHLWGQGTL |
| | | VTVSS |
| TIGIT-269-9 | 1536 | EVQLLESGGGLVQPGGSLRLSCAASGFSFSNHAMSWVRQAPGKGLEWVSAISGSYY |
| | | ADSVKGRFTISRDNSKNTLYLQMNSLRAEDTAVYYCARSTRDRAFDYWGQGTLVT |
| | | VSS |
| TIGIT-269- | 1537 | EVQLLESGGGLVQPGGSLRLSCAASGFSFSSSGMSWVRQAPGKGLEWVSAISGSYYA |
| 10 | | DSVKGRFTISRDNSKNTLYLQMNSLRAEDTAVYYCVKVGDYFAFDHWGQGTLVTV |
| | | SS |
| TIGIT-269- | 1538 | QVQLVQSGAEVKKPGSSVKVSCKASGGTFRRHAISWVRQAPGQGLEWMGGIIPMNY |
| 11 | | AQKFQGRVTITADESTSTAYMELSSLRSEDTAVYYCARGTALVRRAFDIWGQGTLVT |
| | | VSS |
| TIGIT-269- | 1539 | QVQLVQSGAEVKKPGSSVKVSCKASGGTYTTHGISWVRQAPGQGLEWMGGIIPINY |
| 12 | | AQKFQGRVTITADESTSTAYMELSSLRSEDTAVYYCARAFGLASGKGPGVFDYWGQ |
| | | GTLVTVSS |
| TIGIT-269- | 1540 | EVQLLESGGGLVQPGGSLRLSCAASGFTFSNYAMSWVRQAPGKGLEWVSAISGGYY |
| 13 | | ADSVKGRFTISRDNSKNTLYLQMNSLRAEDTAVYYCAKHRVGARAFDVWGQGTLV |
| | | TVSS |
| TIGIT-269- | 1541 | EVQLLESGGGLVQPGGSLRLSCAASGFTFSNYAMSWVRQAPGKGLEWVSAISGNYY |
| 14 | | ADSVKGRFTISRDNSKNTLYLQMNSLRAEDTAVYYCAKHRVGARAFDVWGQGTLV |
| | | TVSS |
| TIGIT-269- | 1542 | QVQLVQSGAEVKKPGSSVKVSCKASGGTFNIYAISWVRQAPGQGLEWMGGIIPINYA |
| 15 | | QKFQGRVTITADESTSTAYMELSSLRSEDTAVYYCARHPRDFGIHGLDVWGQGTLVT |
| | | VSS |
| TIGIT-269- | 1543 | QVQLVQSGAEVKKPGSSVKVSCKASGGTFSRYGISWVRQAPGQGLEWMGGIIPINY |
| 16 | | AQKFQGRVTITADESTSTAYMELSSLRSEDTAVYYCARVRGGYYYDTWGQGTLVTV |
| | | SS |
| TIGIT-269- | 1544 | QVQLVQSGAEVKKPGSSVKVSCKASGGTFTNHAISWVRQAPGQGLEWMGGINPLN |
| 17 | | YAQKFQGRVTITADESTSTAYMELSSLRSEDTAVYYCATGGGHFRSGRDVWGQGTL |
| | | VTVSS |
| TIGIT-269- | 1545 | EVQLLESGGGLVQPGGSLRLSCAASGFTFASYAMSWVRQAPGKGLEWVSAITNSYY |
| 18 | | ADSVKGRFTISRDNSKNTLYLQMNSLRAEDTAVYYCARHLRLGRGFDSWGQGTLVT |
| | | VSS |
| TIGIT-269- | 1546 | QVQLVQSGAEVKKPGSSVKVSCKASGGTFTYYPISWVRQAPGQGLEWMGGIIPFNY |
| 19 | | AQKFQGRVTITADESTSTAYMELSSLRSEDTAVYYCATPSGGIGRRLDVWGQGTLVT |
| | | VSS |
| TIGIT-269- | 1547 | QVQLVQSGAEVKKPGSSVKVSCKASGGTYTTHGISWVRQAPGQGLEWMGGIIPINY |
| 20 | | AQKFQGRVTITADESTSTAYMELSSLRSEDTAVYYCAKAFGLASGKGPGVFDYWGQ |
| | | GTLVTVSS |
| TIGIT-269- | 1548 | QVQLVQSGAEVKKPGSSVKVSCKASGGTFSQYAISWVRQAPGQGLEWMGGIIPMNY |
| 21 | | AQKFQGRVTITADESTSTAYMELSSLRSEDTAVYYCARESRTLFGVPNAFDIWGQGT |
| | | LVTVSS |
| TIGIT-471- | 2141 | EVQLLESGGGLVQPGGSLRLSCAASGFTFSNYGVSWVRQAPGKGLEWVGYINPSRG |
| 001 | | YTYYADSVKGRFTISRDNSKNTLYLQMNSLRAEDTAVYYCARSYGGGFDYWGQGT |
| | | LVTVSS |
| TIGIT-471- | 2142 | EVQLLESGGGLVQPGGSLRLSCAASGFTFVRYDMAWVRQAPGKGLEWVSTISSGGD |
| 009 | | YTYYPDSVKGRFTISRDNSKNTLYLQMNSLRAEDTAVYYCAKDTYNHFDYWGQGT |
| | | LVTVSS |
| TIGIT-471- | 2143 | EVQLLESGGGLVQPGGSLRLSCAASGFTFSKYGMSWVRQAPGKGLEWVSYINSSRG |
| 017 | | YTYYADSVKGRFTISRDNSKNTLYLQMNSLRAEDTAVYYCARSSGGGFDYWGQGT |
| | | LVTVSS |
| TIGIT-471- | 2144 | EVQLLESGGGLVQPGGSLRLSCAASGFTFSRYFMGWVRQAPGKGLEWVSEISPSGKK |
| 025 | | KYYADSVKGRFTISRDNSKNTLYLQMNSLRAEDTAVYYCAKSSFDKYNFDYWGQG |
| | | TLVTVSS |
| TIGIT-471- | 2145 | EVQLLESGGGLVQPGGSLRLSCAASGFTFHKYGMTWVRQAPGKGLEWVSAISSGGG |
| 033 | | YTYYPDSVKGRFTISRDNSKNTLYLQMNSLRAEDTAVYYCARDTYLHFDYWGQGT |
| | | LVTVSS |
| TIGIT-471- | 2146 | EVQLLESGGGLVQPGGSLRLSCAASGFTFSRYVMGWVRQAPGKGLEWVSEISPSGK |
| 041 | | KKYYADSVKGRFTISRDNSKNTLYLQMNSLRAEDTAVYYCAKSSFDKYNFDYWGQ |
| | | GTLVTVSS |
| TIGIT-471- | 2147 | EVQLLESGGGLVQPGGSLRLSCAASGFTFSTYAMNWVRQAPGKGLEWVTEISPSGK |
| 049 | | KKYYADSVKGRFTISRDNSKNTLYLQMNSLRAEDTAVYYCAKSSFDKYNFDYWGQ |
| | | GTLVTVSS |
| TIGIT-471- | 2148 | EVQLLESGGGLVQPGGSLRLSCAASGCTFSSYLMSWVRQAPVKGLEWVGVIWGGG |
| 005 | | GTYYADSVKGRFTISRDNSKNTLYLQMNSLRAEDTAVYYCAKGGTSFDYWGQGTL |
| | | VTVSS |
| TIGIT-471- | 2149 | EVQLLESGGGLVQPGGSLRLSCAASGFTFNAYPMTWVRQAPGKGLEWVSGITGSGG |
| 013 | | STYYADSVKGGFTISRVNSKNTLYLQMNSLRTEDTAVYYCARDGSYSSSWYGYWG |
| | | QGTLVTVSS |
| TIGIT-471- | 2150 | EVQLLESGGGLVQPGGSLRLSCAASGFTFHKYGMACVRQAHEKGLEWVSTISSGGG |
| 021 | | YTYYPDSVKGRLTISRDNSKNTLYLQMNSLRAEDTAVYYCARDTYLHFEYWGQGTL |
| | | VTVSS |
| TIGIT-471- | 2151 | EVQLLESGGGLVQPGGSLRLSCAASGFTFHKYGMAWVRQAPGKGLEWVSTISSGGG |
| 029 | | YTYYPDSVKGRFTISRDNSKNTLYLQMNSLRAEDTAVYYCARDTYLHFDYWGQGT |
| | | LVTVSS |
| TIGIT-471- | 2152 | EVQLLESGGGLVQPGGSLRLSCAASGFTFSPYSMSWVRQAPGKGLEWVSEISPSGKK |
| 037 | | KYYADSVKGRFTISRDNSKNTLYLQMNSLRAEDTAVYYCARSSFDKYNFDYWGQG |
| | | TLVTVSS |
| TIGIT-471- | 2153 | EVQLLESGGGLVQPGGSLRLSCAASGFTFSRYFMGWVRQAPGKGLEWVSEISPSGKK |
| 045 | | KYYADSVKGRFTISRDNSKNTLYLQMNSLRAEDTAVYYCAKSSFDKYNFDYWGQG |
| | | TLVTVSS |
| TIGIT-471- | 2154 | EVQLLESGGGLVQPGGSLRLSCAASGFTFSSYFMSWVRQAPGKGLEWVGVIWGGGG |
| 002 | | TYYADSVKGRFTISRDNSKNTLYLQMNSLRAEDTAVYYCAKGGTSFDYWGQGTLV |
| | | TVSS |
| TIGIT-471- | 2155 | EVQLLESGGGLVQPGGSLRLSCAASGFTFSRYIMGWVRQAPRKGLKWVSEISLIGKK |
| 010 | | KYYADSVKGRFTISRDNSKNTLYLQMNSLRAEDTAVYYCAKSSFDKYNFDYWGQG |
| | | TLVTVSS |
| TIGIT-471- | 2156 | EVQLLESGGGLVQPGGSLRLSCAASGFTFSNYGVSWVRQAPGKGLEWVGYINRSRE |
| 018 | | YTYYADSVKGRFTISRDNSKNTLYLQMNSLRAEDTAVYYCARSYGGGFDYWGQGT |
| | | LVTVSS |
| TIGIT-471- | 2157 | EVQLLESGGGLVQPGGSLRLSCAASGFTFSRYAMNWVRQAPGKGLEWVSEISPSGK |
| 026 | | KKYYADSVKGRFTISRDNSKNTLYLQMNSLRAEDTAVYYCAKSSFDKYNFDYWGQ |
| | | GTLVTVSS |
| TIGIT-471- | 2158 | EVQLLESGGGLVQPGGSLRLSCAASGFTFSRYFMGWVRQAPGKGLEWVSEISPSGKK |
| 034 | | KYYAESVKGRFTISRDNSKNTLYLQMNSLRAEDTAVYYCAKSSFDKYNFDYWGQG |
| | | TLVTVSS |
| TIGIT-471- | 2159 | EVQLLESGGGLVQPGGSLRLSCAASGFTFHKYGMAWVRQAPGKGLEWVSTISGGGG |
| 042 | | YTYYPDSVKGRFTISRDNSKNTLYLQMNSLRAEDTAVYYCARDTYLHFDYWGQGT |
| | | LVTVSS |
| TIGIT-471- | 2160 | EVQLLESGGGLVQPGGSLRLSCAASGFTFSKYGVSWVRQAPGKGLEWVCYINSGSG |
| 006 | | YTYYADSVKGRFTISRDNSKNTLYLQMNSLRAEDTAVYYCARASYVHFDYWGQGT |
| | | LVTVSS |
| TIGIT-471- | 2161 | EVQLLESGGGLVQPGGSLRLSCAASGFTFSSYFMSWVRQAPGKGLECVGVIWGGGG |
| 014 | | TYYADSVKGRFTISRDNSKNTLYLQMNSLRAEDTAVYYCAKGGTSFDYWGQGTLV |
| | | TVSS |
| TIGIT-471- | 2162 | EVQLLESGGGLVQPGGSLRLSCAASGFTFSSYLMSWIRQAPGKGLEWVGVIWGGGG |
| 022 | | TYYADSVKGRFTISRDNSKNTLYLQMNSLRAEDTAVYYCAKGGTSFDYWGQGTLV |
| | | TVSS |
| TIGIT-471- | 2163 | EVQLLESGGGLVQPGGSLRLSCAASGFTFSRYVMNWVRQAPGKGLEWVSEISPSGK |
| 030 | | KKYYADSVKGRFTISRDNSKNTLYLQMNSLRAEDTAVYYCAKSSFDKYNFDYWGQ |
| | | GTLVTVSS |
| TIGIT-471- | 2164 | EVQLLESGGGLVQPGGSLRLSCAASGFTFSNYGVSWVRQAPGKGLEWVGYINPSRG |
| 038 | | YTYYADSVKGRFTISRDNSKNTLYLQMNSLRAEDTAVYYCARSYGGGFDYWGQGT |
| | | LVTVSS |
| TIGIT-471- | 2165 | EVQLLESGGGLVQPGGSLRLSCAASGFTFEDETMSWVRQAPGKGLEWVSAISGSGG |
| 046 | | GTSYADSVKGRFTISRDNSKNTLYLQMNSLRAEDTAVYYCARDVIAGPFDYWGQGT |
| | | LVTVSS |
| TIGIT-471- | 2166 | EVQLLESGGGLVQPGGSLRLSCAASGFTFSNYGVSWVRQAPGKGLEWVSWISPHGA |
| 003 | | LTYYADSVKGRFTISRDNSKNTLYLQMNSLKAEDTAVYYCAKGRRRFDYWGQGTL |
| | | VTVSS |
| TIGIT-471- | 2167 | EVQLLESGGGLVQPGGSLRLSCAASGFTFSNYGVSWVRQAPGKGLEWVSSIDWHG |
| 011 | | WVTYYADSVKGRFTISRDNSKNTLYLQMNSLRAEDTAVYYCVKNALRFDYWGQGT |
| | | LVTVSS |
| TIGIT-471- | 2168 | EVQLLESGGGLVQPGGSLRLSCAASGFTFSNYGVSWVRQAHGKGLEWVVYINPSRG |
| 019 | | YTYYADSVKGRFSISRDNSKNTLYLQMNSLRAEDTAVYYCARSYGGGFDYWGQGT |
| | | LVTVSS |
| TIGIT-471- | 2169 | EVQLLESGGGLVQPGGSLRLSCAASGFTFSNYGVSWVRQAPGKGLEWVSWISPHGA |
| 027 | | LTYYADSVKGRFTISRDNSKNTLYLQMNSLKAEDTAVYYCAKGRRRFDYWGQGTL |
| | | VTVSS |
| TIGIT-471- | 2170 | EVQLLESGGGLVQPGGSLRLSCAASGFTFNAYPMTWVRQAPGKGLEWVSAITGSGG |
| 035 | | STYYADSVKGRFTISRDNSKNTLYLQMNSLRAEDTAVYYCARVWRNHLDYWGQGT |
| | | LVTVSS |
| TIGIT-471- | 2171 | EVQLLESGGGLVQPGGSLRLSCAASGFTFEHNDMHWVRQAPGKGLEWVSGISPSGGI |
| 043 | | TTYADSVKGRFTISRDNSKNTLYLQMNSLRAEDTAVYYCAKQAPGEKWLARGRLD |
| | | YWGQGTLVTVSS |
| TIGIT-471- | 2172 | EVQLLESGGGLVQPGGSLRLSCAASDLHSRSYVMGWVRQAPGKGLEWVSEISRSGK |
| 007 | | KKYYADSVKGRFTISRDNSKNTLYLQMNSLRAEDTAVYYCAKSSFGEYNFDYWGQ |
| | | GTLVTVSS |
| TIGIT-471- | 2173 | EVQLLESGGGLVQPGGSLRLSCAASGFTFDKYDMAWVRQAPGKGLEWVSTICSGGD |
| 015 | | YTYYPDSVKGRFTISRDNSKNTLYLQMNSLRAEDTAVYYCARDTYIHFDYWGQGTL |
| | | VTVSS |
| TIGIT-471- | 2174 | EVQLLESGGGLVQPGGSLRLSCAASGFTFNKYPMMWVRQAPGKGLEWVSTIGPSGT |
| 023 | | STYYADSVKGRFTISRDNSKNTLYLQMNSLRAEDTAVYYCARRSYFRRFDYWGQGT |
| | | LVTVSS |
| TIGIT-471- | 2175 | EVQLLESGGGLVQPGGSLRLSCAASGFTFSRYAMNWVRQAPGKGLEWVSEISPSGK |
| 031 | | KKYYADSVKGRFTISRDNSKNTLYLQMNSLRAEDTAVYYCAKSSFDKYNFDYWGQ |
| | | GTLVTVSS |
| TIGIT-471- | 2176 | EVQLLESGGGLVQPGGSLRLSCAASGFTFNADPMSWVRQAPGKGLEWVSAITGSGG |
| 039 | | STYYADSVKGRFTISRDNSKNTLYLQMNSLRAEDTAVYYCARDGSYSSSWYGYWG |
| | | QGTLVTVSS |
| TIGIT-471- | 2177 | EVQLLESGGGLVQPGGSLRLSCAASGFTFEVYTMAWVRQAPGKGLEWVSSIHPKGY |
| 047 | | PTRYADSVKGRFTISRDNSKNTLYLQMNSLRAEDTAVYYCAKGWFGNFDYWGQGT |
| | | LVTVSS |
| TIGIT-471- | 2178 | EVQLLESGGGLVQPGGSLRLSCAASGFTFHKYGMTWVRQAPGKGLEWVSSISSGGG |
| 004 | | YTYYPDSVKGRFTISRDNSKNTLYLQMNSLRAEDTAVYYCARDTYLHFDYWGQGT |
| | | LVTVSS |
| TIGIT-471- | 2179 | EVQLLESGGGLVQPGGSLRLSCAASGFTFNKYPMMWVRQAPGKGLEWVSGITRSGS |
| 012 | | TNYRDSVKGRFTISRDNSKNTLYLQMNSLRAEDTAVYYCAKKLSNGFDYWGQGTL |
| | | VTVSS |
| TIGIT-471- | 2180 | EVQLLESGGGLVQPGGSLRLSCAASASSVSRYVMGCVGQARGKGLKWVSEISRIGK |
| 020 | | KKCYADSVKGRFAISRDNCKNTLYLQMNSMRAEDTAVYYCEKSSFDKYNFDYWGQ |
| | | GTLVTVSS |
| TIGIT-471- | 2181 | EVQLLESGGGLVQPGGSLRLSCAASGFTFPVYNMAWVRQAPGKGLEWVSGIYPSGG |
| 028 | | STVYADSVKGRFTISRDNSKNTLYLQMNSLRAEDTAVYYCARHRAGSSGWYSDYW |
| | | GQGTLVTVSS |
| TIGIT-471- | 2182 | EVQLLESGGGLVQPGGSLRLSCAASGFTFSSYFMSWVRQAPGKGLEWVGVIWGGGG |
| 036 | | TYYADSVKGRFTIYRDNSKNTLYLQMNSLRAEDTAVYYCAKGGTSFDYWGQGTLV |
| | | TVSS |
| TIGIT-471- | 2183 | EVQLLESGGGLVQPGGSLRLSCAASGFTFSRYFMGWVRQAPGKGLEWVSEISPSGKK |
| 044 | | KYYADSVKGRFTISRDNSKNTLYLQMNSLRAEDTAVYYCAKSSFDKYNFHYWGQG |
| | | TLVTVSS |
| TIGIT-471- | 2184 | EVQLLESGGGLVQPGGSLRLSCAASGFTFEPVIMGWVRQAPGKGLEWVSSISPNGW |
| 008 | | DTYYADSVKGRFTISRDNSKNTLYLQMNSLRAEDTAVYYCATETSPNDYWGQGTLV |
| | | TVSS |
| TIGIT-471- | 2185 | EVQLLESGGGLVQPGGSLRLSCAASGFTFHKYGMAWVRQAPGKGLEWVSTISSGGG |
| 016 | | YTYYPDSVKGRFTISRDNSKNTLYLQMNSLRAEDTAVYHCARDTYLHFDYWGQGT |
| | | LVTVSS |
| TIGIT-471- | 2186 | EVQLLESGGGLVQPGGSLRLSCAASGFTFEPVIMGWVRQAPGKGLEWVSSISPNGW |
| 024 | | DTYYADSVKGRFTISRDNSKNTLYLQMNSLRAEDTAVYYCATETSPNDYWGQGTLV |
| | | TVSS |
| TIGIT-471- | 2187 | EVQLLESGGGLVQPGGSLRLSCAASGFTFHKYGMAWVRQAPGKGLEWVSTISSGGG |
| 032 | | YTYYPDSVKGRFTISRDNSKNTLYLQMNSLRAEDTAVYYCARDTYLHFDYWGQGT |
| | | LVTVSS |
| TIGIT-471- | 2188 | EVQLLESGGGLVQPGGSLRLSCAASGFTFHKYGMAWVRQAPGKGLEWVSTISSGGG |
| 040 | | YTYYPDSVKGRFTISRDNSKNTLYLQMNSLRAEDTAVYYCARDTYLHFDYWGQGT |
| | | LVTVSS |
| TIGIT-471- | 2189 | EVQLLESGGGLVQPGGSLRLSCAASGFTFSNYGVSWVRQAPGKGLEWVGYINPSRG |
| 048 | | YTYYADSVKGRFTISRDNSKNTLYLQMNSLRAEDTAVYYCARSYGGGFDYWGQGT |
| | | LVTVSS |

TABLE 14
Variable Domain of Light Chain Sequences

| | SEQ | |
|---|---|---|
| Variant | ID NO | Variable Domain of Light Chain Sequence |
| TIGIT-211-1 | 1549 | DIQMTQSPSSLSASVGDRVTITCRSSQSLVHSTGNTYLHWYQQKPGKAPKLLIYAAS |
| | | DLESGVPSRFSGSGSGTDFTLTISSLQPEDFATYYCQQGHTLPWTFGQGTKVEIK |
| TIGIT-211-2 | 1550 | DIQMTQSPSSLSASVGDRVTITCRTSQDIGNYLNWYQQKPGKAPKLLIYPKHNRPPGV |
| | | PSRFSGSGSGTDFTLTISSLQPEDFATYYCQQSYNSPWTFGQGTKVEIK |
| TIGIT-211-3 | 1551 | DIQMTQSPSSLSASVGDRVTITCRSSQSLVHSTGNTYLHWYQQKPGKAPKLLIYAAS |
| | | DLESGVPSRFSGSGSGTDFTLTISSLQPEDFATYYCQQGHTLPWTFGQGTKVEIK |
| TIGIT-211-4 | 1552 | DIQMTQSPSSLSASVGDRVTITCRSSQSLVHSTGNTYLHWYQQKPGKAPKLLIYAAS |
| | | DLESGVPSRFSGSGSGTDFTLTISSLQPEDFATYYCQQGHTLPWTFGQGTKVEIK |
| TIGIT-211-5 | 1553 | DIQMTQSPSSLSASVGDRVTITCRSSQSLVHSTGNTYLHWYQQKPGKAPKLLIYAAS |
| | | DLESGVPSRFSGSGSGTDFTLTISSLQPEDFATYYCQQGHTLPWTFGQGTKVEIK |
| TIGIT-211-6 | 1554 | DIQMTQSPSSLSASVGDRVTITCRSSQSLVHSTGNTYLHWYQQKPGKAPKLLIYAAS |
| | | DLESGVPSRFSGSGSGTDFTLTISSLQPEDFATYYCQQGHTLPWTFGQGTKVEIK |
| TIGIT-211-7 | 1555 | DIQMTQSPSSLSASVGDRVTITCSGDKLRNKYASWYQQKPGKAPKLLIYGQHNRPSG |
| | | VPSRFSGSGSGTDFTLTISSLQPEDFATYYCQGSYYSGSGWYYAFGQGTKVEIK |
| TIGIT-211-8 | 1556 | DIQMTQSPSSLSASVGDRVTITCRSSQSLVHSTGNTYLHWYQQKPGKAPKLLIYAAS |
| | | DLESGVPSRFSGSGSGTDFTLTISSLQPEDFATYYCQQGHTLPWTFGQGTKVEIK |
| TIGIT-211-9 | 1557 | DIQMTQSPSSLSASVGDRVTITCRSSQSLVHSTGNTYLHWYQQKPGKAPKLLIYAAS |
| | | DLESGVPSRFSGSGSGTDFTLTISSLQPEDFATYYCQQGHTLPWTFGQGTKVEIK |
| TIGIT-211- | 1558 | DIQMTQSPSSLSASVGDRVTITCRSSQSLVHSTGNTYLHWYQQKPGKAPKLLIYAAS |
| 10 | | DLESGVPSRFSGSGSGTDFTLTISSLQPEDFATYYCQQGHTLPWTFGQGTKVEIK |
| TIGIT-211- | 1559 | DIQMTQSPSSLSASVGDRVTITCRSSQSLVHSTGNTYLHWYQQKPGKAPKLLIYAAS |
| 11 | | DLESGVPSRFSGSGSGTDFTLTISSLQPEDFATYYCQQGHTLPWTFGQGTKVEIK |
| TIGIT-211- | 1560 | DIQMTQSPSSLSASVGDRVTITCSGDKLGHTYTSWYQQKPGKAPKLLIYYTSSLHSGV |
| 12 | | PSRFSGSGSGTDFTLTISSLQPEDFATYYCATRAVRGNPHVLFGQGTKVEIK |
| TIGIT-211- | 1561 | DIQMTQSPSSLSASVGDRVTITCRASQSIREYLHWYQQKPGKAPKLLIYFGSELRKGV |
| 13 | | PSRFSGSGSGTDFTLTISSLQPEDFATYYCGQGVLWPATFGQGTKVEIK |
| TIGIT-211- | 1562 | DIQMTQSPSSLSASVGDRVTITCSGDTLGGKYAWWYQQKPGKAPKLLIYQNDKRPS |
| 14 | | GVPSRFSGSGSGTDFTLTISSLQPEDFATYYCHQWSSYPTFGQGTKVEIK |
| TIGIT-211- | 1563 | DIQMTQSPSSLSASVGDRVTITCQSSQSVYSNNELSWYQQKPGKAPKLLIYGTSYRYS |
| 15 | | GVPSRFSGSGSGTDFTLTISSLQPEDFATYYCSSWAGSRSGTVFGQGTKVEIK |
| TIGIT-211- | 1564 | DIQMTQSPSSLSASVGDRVTITCSGDKLGHTYTSWYQQKPGKAPKLLIYRTSWLQSG |
| 16 | | VPSRFSGSGSGTDFTLTISSLQPEDFATYYCQQYHSYPPTFGQGTKVEIK |
| TIGIT-211- | 1565 | DIQMTQSPSSLSASVGDRVTITCRASQTIERRLNWYQQKPGKAPKLLIYQNDKRPSGV |
| 17 | | PSRFSGSGSGTDFTLTISSLQPEDFATYYCQQSYSIPPTFGQGTKVEIK |
| TIGIT-211- | 1566 | DIQMTQSPSSLSASVGDRVTITCSGDKLGDKYTSWYQQKPGKAPKLLIYHTSRLQDG |
| 18 | | VPSRFSGSGSGTDFTLTISSLQPEDFATYYCQQSYNLPLTFGQGTKVEIK |
| TIGIT-211- | 1567 | DIQMTQSPSSLSASVGDRVTITCRSSQSLVHSTGNTYLHWYQQKPGKAPKLLIYAAS |
| 19 | | DLESGVPSRFSGSGSGTDFTLTISSLQPEDFATYYCQQGHTLPWTFGQGTKVEIK |
| TIGIT-211- | 1568 | DIQMTQSPSSLSASVGDRVTITCRSSQSLVHSTGNTYLHWYQQKPGKAPKLLIYAAS |
| 20 | | DLESGVPSRFSGSGSGTDFTLTISSLQPEDFATYYCQQGHTLPWTFGQGTKVEIK |
| TIGIT-211- | 1569 | DIQMTQSPSSLSASVGDRVTITCRSSQSLVHSTGNTYLHWYQQKPGKAPKLLIYAAS |
| 21 | | DLESGVPSRFSGSGSGTDFTLTISSLQPEDFATYYCQQGHTLPWTFGQGTKVEIK |
| TIGIT-211- | 1570 | DIQMTQSPSSLSASVGDRVTITCRASQGVRTSLAWYQQKPGKAPKLLIYAKNNRPSG |
| 22 | | VPSRFSGSGSGTDFTLTISSLQPEDFATYYCQQSYHTPQTFGQGTKVEIK |
| TIGIT-211- | 1571 | DIQMTQSPSSLSASVGDRVTITCRSSQSLVHSTGNTYLHWYQQKPGKAPKLLIYAAS |
| 23 | | DLESGVPSRFSGSGSGTDFTLTISSLQPEDFATYYCQQGHTLPWTFGQGTKVEIK |
| TIGIT-211- | 1572 | DIQMTQSPSSLSASVGDRVTITCRSSQSLVHSTGNTYLHWYQQKPGKAPKLLIYAAS |
| 24 | | DLESGVPSRFSGSGSGTDFTLTISSLQPEDFATYYCQQGHTLPWTFGQGTKVEIK |
| TIGIT-211- | 1573 | DIQMTQSPSSLSASVGDRVTITCRASQTIERRLNWYQQKPGKAPKLLIYAKNNRPSGV |
| 25 | | PSRFSGSGSGTDFTLTISSLQPEDFATYYCQQTALVPYTFGQGTKVEIK |
| TIGIT-211- | 1574 | DIQMTQSPSSLSASVGDRVTITCRASQTIGDYLNWYQQKPGKAPKLLIYGASSRATG |
| 26 | | VPSRFSGSGSGTDFTLTISSLQPEDFATYYCAQGAALPRTFGQGTKVEIK |
| TIGIT-211- | 1575 | DIQMTQSPSSLSASVGDRVTITCRSSQSLVHSTGNTYLHWYQQKPGKAPKLLIYAAS |
| 27 | | DLESGVPSRFSGSGSGTDFTLTISSLQPEDFATYYCQQGHTLPWTFGQGTKVEIK |
| TIGIT-211- | 1576 | DIQMTQSPSSLSASVGDRVTITCQGASLRNYYASWYQQKPGKAPKLLIYDTSKVASG |
| 28 | | VPSRFSGSGSGTDFTLTISSLQPEDFATYYCFQGSHIPYTFGQGTKVEIK |
| TIGIT-211- | 1577 | DIQMTQSPSSLSASVGDRVTITCRASQSISNNLNWYQQKPGKAPKLLIYAKNNRPSGV |
| 29 | | PSRFSGSGSGTDFTLTISSLQPEDFATYYCQQSYTTPPTFGQGTKVEIK |
| TIGIT-211- | 1578 | DIQMTQSPSSLSASVGDRVTITCRASQPIGPDLLWYQQKPGKAPKLLIYRKSNRPSGV |
| 30 | | PSRFSGSGSGTDFTLTISSLQPEDFATYYCQQSYSTPYTFGQGTKVEIK |
| TIGIT-211- | 1579 | DIQMTQSPSSLSASVGDRVTITCRASQSIRRFLNWYQQKPGKAPKLLIYWASDRESGV |
| 31 | | PSRFSGSGSGTDFTLTISSLQPEDFATYYCQQTATWPFTFGQGTKVEIK |
| TIGIT-211- | 1580 | DIQMTQSPSSLSASVGDRVTITCRSSQSLVHSTGNTYLHWYQQKPGKAPKLLIYAAS |
| 32 | | DLESGVPSRFSGSGSGTDFTLTISSLQPEDFATYYCQQGHTLPWTFGQGTKVEIK |
| TIGIT-211- | 1581 | DIQMTQSPSSLSASVGDRVTITCRSSQSLVHSTGNTYLHWYQQKPGKAPKLLIYAAS |
| 33 | | DLESGVPSRFSGSGSGTDFTLTISSLQPEDFATYYCQQGHTLPWTFGQGTKVEIK |
| TIGIT-211- | 1582 | DIQMTQSPSSLSASVGDRVTITCRANQNIGNFLNWYQQKPGKAPKLLIYQDFKRPSG |
| 34 | | VPSRFSGSGSGTDFTLTISSLQPEDFATYYCHQRSSYPWTFGQGTKVEIK |
| TIGIT-211- | 1583 | DIQMTQSPSSLSASVGDRVTITCSGNKLGDKYASWYQQKPGKAPKLLIYRTSWLQSG |
| 35 | | VPSRFSGSGSGTDFTLTISSLQPEDFATYYCVARAVRGNPHVLFGQGTKVEIK |
| TIGIT-211- | 1584 | DIQMTQSPSSLSASVGDRVTITCRSSQSLVHSTGNTYLHWYQQKPGKAPKLLIYAAS |
| 36 | | DLESGVPSRFSGSGSGTDFTLTISSLQPEDFATYYCQQGHTLPWTFGQGTKVEIK |
| TIGIT-211- | 1585 | DIQMTQSPSSLSASVGDRVTITCRSSQSLVHSTGNTYLHWYQQKPGKAPKLLIYAAS |
| 37 | | DLESGVPSRFSGSGSGTDFTLTISSLQPEDFATYYCQQGHTLPWTFGQGTKVEIK |
| TIGIT-211- | 1586 | DIQMTQSPSSLSASVGDRVTITCRSSQSLVHSTGNTYLHWYQQKPGKAPKLLIYAAS |
| 38 | | DLESGVPSRFSGSGSGTDFTLTISSLQPEDFATYYCQQGHTLPWTFGQGTKVEIK |
| TIGIT-211- | 1587 | DIQMTQSPSSLSASVGDRVTITCRSSQSLVHSTGNTYLHWYQQKPGKAPKLLIYAAS |
| 39 | | DLESGVPSRFSGSGSGTDFTLTISSLQPEDFATYYCQQGHTLPWTFGQGTKVEIK |
| TIGIT-211- | 1588 | DIQMTQSPSSLSASVGDRVTITCRASQDIGNFLNWYQQKPGKAPKLLIYRTSWLQSG |
| 40 | | VPSRFSGSGSGTDFTLTISSLQPEDFATYYCQQRSSYPPTFGQGTKVEIK |
| TIGIT-211- | 1589 | DIQMTQSPSSLSASVGDRVTITCRSSQSLVHSTGNTYLHWYQQKPGKAPKLLIYAAS |
| 41 | | DLESGVPSRFSGSGSGTDFTLTISSLQPEDFATYYCQQGHTLPWTFGQGTKVEIK |
| TIGIT-211- | 1590 | DIQMTQSPSSLSASVGDRVTITCRASQGVRTSLAWYQQKPGKAPKLLIYGKNIRPSGV |
| 42 | | PSRFSGSGSGTDFTLTISSLQPEDFATYYCQQSYSFPLTFGQGTKVEIK |
| TIGIT-211- | 1591 | DIQMTQSPSSLSASVGDRVTITCRASQSIRRYLNWYQQKPGKAPKLLIYWASDRESG |
| 43 | | VPSRFSGSGSGTDFTLTISSLQPEDFATYYCQQSFSTPLTFGQGTKVEIK |
| TIGIT-211- | 1592 | DIQMTQSPSSLSASVGDRVTITCRSSQSLVHSTGNTYLHWYQQKPGKAPKLLIYAAS |
| 44 | | DLESGVPSRFSGSGSGTDFTLTISSLQPEDFATYYCQQGHTLPWTFGQGTKVEIK |
| TIGIT-211- | 1593 | DIQMTQSPSSLSASVGDRVTITCRASQSIRRYLNWYQQKPGKAPKLLIYDASNLQSGV |
| 45 | | PSRFSGSGSGTDFTLTISSLQPEDFATYYCQQSYDFPRTFGQGTKVEIK |
| TIGIT-211- | 1594 | DIQMTQSPSSLSASVGDRVTITCRSSQSLVHSTGNTYLHWYQQKPGKAPKLLIYAAS |
| 46 | | DLESGVPSRFSGSGSGTDFTLTISSLQPEDFATYYCQQGHTLPWTFGQGTKVEIK |
| TIGIT-211- | 1595 | DIQMTQSPSSLSASVGDRVTITCRSSQSLVHSTGNTYLHWYQQKPGKAPKLLIYAAS |
| 47 | | DLESGVPSRFSGSGSGTDFTLTISSLQPEDFATYYCQQGHTLPWTFGQGTKVEIK |
| TIGIT-211- | 1596 | DIQMTQSPSSLSASVGDRVTITCRSSQSLVHSTGNTYLHWYQQKPGKAPKLLIYAAS |
| 48 | | DLESGVPSRFSGSGSGTDFTLTISSLQPEDFATYYCQQGHTLPWTFGQGTKVEIK |
| TIGIT-211- | 1597 | DIQMTQSPSSLSASVGDRVTITCRSSQSLVHSTGNTYLHWYQQKPGKAPKLLIYAAS |
| 49 | | DLESGVPSRFSGSGSGTDFTLTISSLQPEDFATYYCQQGHTLPWTFGQGTKVEIK |
| TIGIT-211- | 1598 | DIQMTQSPSSLSASVGDRVTITCRSSQSLVHSTGNTYLHWYQQKPGKAPKLLIYAAS |
| 50 | | DLESGVPSRFSGSGSGTDFTLTISSLQPEDFATYYCQQGHTLPWTFGQGTKVEIK |
| TIGIT-211- | 1599 | DIQMTQSPSSLSASVGDRVTITCRASQGVRTSLAWYQQKPGKAPKLLIYAKNNRPSG |
| 51 | | VPSRFSGSGSGTDFTLTISSLQPEDFATYYCQQSYSAPYTFGQGTKVEIK |
| TIGIT-211- | 1600 | DIQMTQSPSSLSASVGDRVTITCRSSQSLVHSTGNTYLHWYQQKPGKAPKLLIYAAS |
| 52 | | DLESGVPSRFSGSGSGTDFTLTISSLQPEDFATYYCQQGHTLPWTFGQGTKVEIK |
| TIGIT-211- | 1601 | DIQMTQSPSSLSASVGDRVTITCRASQTIGDYLNWYQQKPGKAPKLLIYGQHNRPSG |
| 53 | | VPSRFSGSGSGTDFTLTISSLQPEDFATYYCQQSFSIPWTFGQGTKVEIK |
| TIGIT-211- | 1602 | DIQMTQSPSSLSASVGDRVTITCKASDHIGKFLTWYQQKPGKAPKLLIYAASKLASGV |
| 54 | | PSRFSGSGSGTDFTLTISSLQPEDFATYYCQQVVWRPFTFGQGTKVEIK |
| TIGIT-211- | 1603 | DIQMTQSPSSLSASVGDRVTITCRASQTIGDYLNWYQQKPGKAPKLLIYHDNKRPSG |
| 55 | | VPSRFSGSGSGTDFTLTISSLQPEDFATYYCQQDAFHPPTFGQGTKVEIK |
| TIGIT-211- | 1604 | DIQMTQSPSSLSASVGDRVTITCRSSQSLVHSTGNTYLHWYQQKPGKAPKLLIYAAS |
| 56 | | DLESGVPSRFSGSGSGTDFTLTISSLQPEDFATYYCQQGHTLPWTFGQGTKVEIK |
| TIGIT-211- | 1605 | DIQMTQSPSSLSASVGDRVTITCRSSQSLVHSTGNTYLHWYQQKPGKAPKLLIYGKNI |
| 57 | | RPSGVPSRFSGSGSGTDFTLTISSLQPEDFATYYCQQSYTTPWTFGQGTKVEIK |
| TIGIT-211- | 1606 | DIQMTQSPSSLSASVGDRVTITCRSSQSLVHSTGNTYLHWYQQKPGKAPKLLIYAAS |
| 58 | | DLESGVPSRFSGSGSGTDFTLTISSLQPEDFATYYCQQGHTLPWTFGQGTKVEIK |
| TIGIT-211- | 1607 | DIQMTQSPSSLSASVGDRVTITCRSSQSLVHSTGNTYLHWYQQKPGKAPKLLIYAAS |
| 59 | | DLESGVPSRFSGSGSGTDFTLTISSLQPEDFATYYCQQGHTLPWTFGQGTKVEIK |
| TIGIT-211- | 1608 | DIQMTQSPSSLSASVGDRVTITCRSSQSLVHSTGNTYLHWYQQKPGKAPKLLIYAAS |
| 60 | | DLESGVPSRFSGSGSGTDFTLTISSLQPEDFATYYCQQGHTLPWTFGQGTKVEIK |
| TIGIT-211- | 1609 | DIQMTQSPSSLSASVGDRVTITCRSSQSLVHSTGNTYLHWYQQKPGKAPKLLIYAAS |
| 61 | | DLESGVPSRFSGSGSGTDFTLTISSLQPEDFATYYCQQGHTLPWTFGQGTKVEIK |
| TIGIT-211- | 1610 | DIQMTQSPSSLSASVGDRVTITCRSSQSLVHSTGNTYLHWYQQKPGKAPKLLIYAAS |
| 62 | | DLESGVPSRFSGSGSGTDFTLTISSLQPEDFATYYCQQGHTLPWTFGQGTKVEIK |
| TIGIT-211- | 1611 | DIQMTQSPSSLSASVGDRVTITCRSSQSLVHSTGNTYLHWYQQKPGKAPKLLIYAAS |
| 63 | | DLESGVPSRFSGSGSGTDFTLTISSLQPEDFATYYCQQGHTLPWTFGQGTKVEIK |
| TIGIT-211- | 1612 | DIQMTQSPSSLSASVGDRVTITCRSSQSLVHSTGNTYLHWYQQKPGKAPKLLIYAAS |
| 64 | | DLESGVPSRFSGSGSGTDFTLTISSLQPEDFATYYCQQGHTLPWTFGQGTKVEIK |
| TIGIT-211- | 1613 | DIQMTQSPSSLSASVGDRVTITCRSSQSLVHSTGNTYLHWYQQKPGKAPKLLIYAAS |
| 65 | | DLESGVPSRFSGSGSGTDFTLTISSLQPEDFATYYCQQGHTLPWTFGQGTKVEIK |
| TIGIT-211- | 1614 | DIQMTQSPSSLSASVGDRVTITCRSSQSLVHSTGNTYLHWYQQKPGKAPKLLIYAAS |
| 66 | | DLESGVPSRFSGSGSGTDFTLTISSLQPEDFATYYCQQGHTLPWTFGQGTKVEIK |
| TIGIT-211- | 1615 | DIQMTQSPSSLSASVGDRVTITCRSSQSLVHSTGNTYLHWYQQKPGKAPKLLIYAAS |
| 67 | | DLESGVPSRFSGSGSGTDFTLTISSLQPEDFATYYCQQGHTLPWTFGQGTKVEIK |
| TIGIT-211- | 1616 | DIQMTQSPSSLSASVGDRVTITCRSSQSLVHSTGNTYLHWYQQKPGKAPKLLIYAAS |
| 68 | | DLESGVPSRFSGSGSGTDFTLTISSLQPEDFATYYCQQGHTLPWTFGQGTKVEIK |
| TIGIT-211- | 1617 | DIQMTQSPSSLSASVGDRVTITCRASQNIRSYLNWYQQKPGKAPKLLIYGASTLQSGV |
| 69 | | PSRFSGSGSGTDFTLTISSLQPEDFATYYCQQSYENPLTFGQGTKVEIK |
| TIGIT-211- | 1618 | DIQMTQSPSSLSASVGDRVTITCRSSQSLVHSTGNTYLHWYQQKPGKAPKLLIYAAS |
| 70 | | DLESGVPSRFSGSGSGTDFTLTISSLQPEDFATYYCQQGHTLPWTFGQGTKVEIK |
| TIGIT-211- | 1619 | DIQMTQSPSSLSASVGDRVTITCRSSQSLVHSTGNTYLHWYQQKPGKAPKLLIYAAS |
| 71 | | DLESGVPSRFSGSGSGTDFTLTISSLQPEDFATYYCQQGHTLPWTFGQGTKVEIK |
| TIGIT-211- | 1620 | DIQMTQSPSSLSASVGDRVTITCRASHNINSYLNWYQQKPGKAPKLLIYGKNIRPSGV |
| 72 | | PSRFSGSGSGTDFTLTISSLQPEDFATYYCQQSYIIPPTFGQGTKVEIK |
| TIGIT-211- | 1621 | DIQMTQSPSSLSASVGDRVTITCRSSQSLVHSTGNTYLHWYQQKPGKAPKLLIYAAS |
| 73 | | DLESGVPSRFSGSGSGTDFTLTISSLQPEDFATYYCQQGHTLPWTFGQGTKVEIK |
| TIGIT-211- | 1622 | DIQMTQSPSSLSASVGDRVTITCRSSQSLVHSTGNTYLHWYQQKPGKAPKLLIYAAS |
| 74 | | DLESGVPSRFSGSGSGTDFTLTISSLQPEDFATYYCQQGHTLPWTFGQGTKVEIK |
| TIGIT-211- | 1623 | DIQMTQSPSSLSASVGDRVTITCRSSQSLVHSTGNTYLHWYQQKPGKAPKLLIYAAS |
| 75 | | DLESGVPSRFSGSGSGTDFTLTISSLQPEDFATYYCQQGHTLPWTFGQGTKVEIK |
| TIGIT-211- | 1624 | DIQMTQSPSSLSASVGDRVTITCRSSQSLVHSTGNTYLHWYQQKPGKAPKLLIYAAS |
| 76 | | DLESGVPSRFSGSGSGTDFTLTISSLQPEDFATYYCQQGHTLPWTFGQGTKVEIK |
| TIGIT-211- | 1625 | DIQMTQSPSSLSASVGDRVTITCRASQSVRSYLNWYQQKPGKAPKLLIYAASSLYSG |
| 77 | | VPSRFSGSGSGTDFTLTISSLQPEDFATYYCQQYASVPVTFGQGTKVEIK |
| TIGIT-211- | 1626 | DIQMTQSPSSLSASVGDRVTITCRSSQSLVHSTGNTYLHWYQQKPGKAPKLLIYAAS |
| 78 | | DLESGVPSRFSGSGSGTDFTLTISSLQPEDFATYYCQQGHTLPWTFGQGTKVEIK |
| TIGIT-211- | 1627 | DIQMTQSPSSLSASVGDRVTITCRASQSVRSYLNWYQQKPGKAPKLLIYAATTLQSG |
| 79 | | VPSRFSGSGSGTDFTLTISSLQPEDFATYYCQQSYIIPPTFGQGTKVEIK |
| TIGIT-211- | 1628 | DIQMTQSPSSLSASVGDRVTITCRASQGVRTSLAWYQQKPGKAPKLLIYGKNIRPSGV |
| 80 | | PSRFSGSGSGTDFTLTISSLQPEDFATYYCQQGYRWPVTFGQGTKVEIK |
| TIGIT-211- | 1629 | DIQMTQSPSSLSASVGDRVTITCRSSQSLVHSTGNTYLHWYQQKPGKAPKLLIYAAS |
| 81 | | DLESGVPSRFSGSGSGTDFTLTISSLQPEDFATYYCQQGHTLPWTFGQGTKVEIK |
| TIGIT-211- | 1630 | DIQMTQSPSSLSASVGDRVTITCRSSQSLVHSTGNTYLHWYQQKPGKAPKLLIYAAS |
| 82 | | DLESGVPSRFSGSGSGTDFTLTISSLQPEDFATYYCQQGHTLPWTFGQGTKVEIK |
| TIGIT-211- | 1631 | DIQMTQSPSSLSASVGDRVTITCSGDKLGDKYTSWYQQKPGKAPKLLIYGASSRATG |
| 83 | | VPSRFSGSGSGTDFTLTISSLQPEDFATYYCMSRSIWGNPHVLFGQGTKVEIK |
| TIGIT-211- | 1632 | DIQMTQSPSSLSASVGDRVTITCSGDKLGHTYTSWYQQKPGKAPKLLIYYTSSLHSGV |
| 84 | | PSRFSGSGSGTDFTLTISSLQPEDFATYYCATRAVRGNPHVLFGQGTKVEIK |
| TIGIT-211- | 1633 | DIQMTQSPSSLSASVGDRVTITCRSSQSLVHSTGNTYLHWYQQKPGKAPKLLIYAAS |
| 85 | | DLESGVPSRFSGSGSGTDFTLTISSLQPEDFATYYCQQGHTLPWTFGQGTKVEIK |
| TIGIT-211- | 1634 | DIQMTQSPSSLSASVGDRVTITCRSSQSLVHSTGNTYLHWYQQKPGKAPKLLIYAAS |
| 86 | | DLESGVPSRFSGSGSGTDFTLTISSLQPEDFATYYCQQGHTLPWTFGQGTKVEIK |
| TIGIT-211- | 1635 | DIQMTQSPSSLSASVGDRVTITCRASQTIGDYLNWYQQKPGKAPKLLIYQDFKRPSGV |
| 87 | | PSRFSGSGSGTDFTLTISSLQPEDFATYYCQQYHDFPLTFGQGTKVEIK |
| TIGIT-211- | 1636 | DIQMTQSPSSLSASVGDRVTITCRSSQSLVHSTGNTYLHWYQQKPGKAPKLLIYAAS |
| 88 | | DLESGVPSRFSGSGSGTDFTLTISSLQPEDFATYYCQQGHTLPWTFGQGTKVEIK |
| TIGIT-211- | 1637 | DIQMTQSPSSLSASVGDRVTITCRSSQSLVHSTGNTYLHWYQQKPGKAPKLLIYAAS |
| 89 | | DLESGVPSRFSGSGSGTDFTLTISSLQPEDFATYYCQQGHTLPWTFGQGTKVEIK |
| TIGIT-211- | 1638 | DIQMTQSPSSLSASVGDRVTITCSGDRLGEKYVSWYQQKPGKAPKLLIYGTTSLESGV |
| 90 | | PSRFSGSGSGTDFTLTISSLQPEDFATYYCQQGYTLPWTFGQGTKVEIK |
| TIGIT-211- | 1639 | DIQMTQSPSSLSASVGDRVTITCRASQSIREYLHWYQQKPGKAPKLLIYFGSELRKGV |
| 91 | | PSRFSGSGSGTDFTLTISSLQPEDFATYYCQNGHSFPLTFGQGTKVEIK |
| TIGIT-211- | 1640 | DIQMTQSPSSLSASVGDRVTITCRSSQSLVHSTGNTYLHWYQQKPGKAPKLLIYAAS |
| 92 | | DLESGVPSRFSGSGSGTDFTLTISSLQPEDFATYYCQQGHTLPWTFGQGTKVEIK |
| TIGIT-211- | 1641 | DIQMTQSPSSLSASVGDRVTITCSASQDINKYLNWYQQKPGKAPKLLIYHTSRLQSGV |
| 93 | | PSRFSGSGSGTDFTLTISSLQPEDFATYYCQQFAYFPATFGQGTKVEIK |
| TIGIT-211- | 1642 | DIQMTQSPSSLSASVGDRVTITCRSSQSLVHSTGNTYLHWYQQKPGKAPKLLIYAAS |
| 94 | | DLESGVPSRFSGSGSGTDFTLTISSLQPEDFATYYCQQGHTLPWTFGQGTKVEIK |
| TIGIT-211- | 1643 | DIQMTQSPSSLSASVGDRVTITCRASQGVRTSLAWYQQKPGKAPKLLIYAKNNRPSG |
| 95 | | VPSRFSGSGSGTDFTLTISSLQPEDFATYYCQQSYSAPYTFGQGTKVEIK |
| TIGIT-211- | 1644 | DIQMTQSPSSLSASVGDRVTITCRSSQSLVHSTGNTYLHWYQQKPGKAPKLLIYAAS |
| 96 | | DLESGVPSRFSGSGSGTDFTLTISSLQPEDFATYYCQQGHTLPWTFGQGTKVEIK |
| TIGIT-211- | 1645 | DIQMTQSPSSLSASVGDRVTITCRSSQSLVHSTGNTYLHWYQQKPGKAPKLLIYAAS |
| 97 | | DLESGVPSRFSGSGSGTDFTLTISSLQPEDFATYYCQQGHTLPWTFGQGTKVEIK |
| TIGIT-211- | 1646 | DIQMTQSPSSLSASVGDRVTITCRASHFIGSLLSWYQQKPGKAPKLLIYETSKLASGVP |
| 98 | | SRFSGSGSGTDFTLTISSLQPEDFATYYCQQSYSYPRTFGQGTKVEIK |
| TIGIT-211- | 1647 | DIQMTQSPSSLSASVGDRVTITCRSSQSLVHSTGNTYLHWYQQKPGKAPKLLIYAAS |
| 99 | | DLESGVPSRFSGSGSGTDFTLTISSLQPEDFATYYCQQGHTLPWTFGQGTKVEIK |
| TIGIT-211- | 1648 | DIQMTQSPSSLSASVGDRVTITCRSSQSLVHSTGNTYLHWYQQKPGKAPKLLIYAAS |
| 100 | | DLESGVPSRFSGSGSGTDFTLTISSLQPEDFATYYCQQGHTLPWTFGQGTKVEIK |
| TIGIT-211- | 1649 | DIQMTQSPSSLSASVGDRVTITCRSSQSLVHSTGNTYLHWYQQKPGKAPKLLIYAAS |
| 101 | | DLESGVPSRFSGSGSGTDFTLTISSLQPEDFATYYCQQGHTLPWTFGQGTKVEIK |
| TIGIT-211- | 1650 | DIQMTQSPSSLSASVGDRVTITCRASQSISNNLNWYQQKPGKAPKLLIYAKNNRPSGV |
| 102 | | PSRFSGSGSGTDFTLTISSLQPEDFATYYCQQSYTTPPTFGQGTKVEIK |
| TIGIT-211- | 1651 | DIQMTQSPSSLSASVGDRVTITCRSSQSLVHSTGNTYLHWYQQKPGKAPKLLIYAAS |
| 103 | | DLESGVPSRFSGSGSGTDFTLTISSLQPEDFATYYCQQGHTLPWTFGQGTKVEIK |
| TIGIT-211- | 1652 | DIQMTQSPSSLSASVGDRVTITCRASQSISNNLNWYQQKPGKAPKLLIYDASSSQSGV |
| 104 | | PSRFSGSGSGTDFTLTISSLQPEDFATYYCQQSSSTPWTFGQGTKVEIK |
| TIGIT-211- | 1653 | DIQMTQSPSSLSASVGDRVTITCRSSQSLVHSTGNTYLHWYQQKPGKAPKLLIYAAS |
| 105 | | DLESGVPSRFSGSGSGTDFTLTISSLQPEDFATYYCQQGHTLPWTFGQGTKVEIK |
| TIGIT-211- | 1654 | DIQMTQSPSSLSASVGDRVTITCRSSQSLVHSTGNTYLHWYQQKPGKAPKLLIYAAS |
| 106 | | DLESGVPSRFSGSGSGTDFTLTISSLQPEDFATYYCQQGHTLPWTFGQGTKVEIK |
| TIGIT-211- | 1655 | DIQMTQSPSSLSASVGDRVTITCRSSQSLVHSTGNTYLHWYQQKPGKAPKLLIYAAS |
| 107 | | DLESGVPSRFSGSGSGTDFTLTISSLQPEDFATYYCQQGHTLPWTFGQGTKVEIK |
| TIGIT-211- | 1656 | DIQMTQSPSSLSASVGDRVTITCRSSQSLVHSTGNTYLHWYQQKPGKAPKLLIYAAS |
| 108 | | DLESGVPSRFSGSGSGTDFTLTISSLQPEDFATYYCQQGHTLPWTFGQGTKVEIK |
| TIGIT-211- | 1657 | DIQMTQSPSSLSASVGDRVTITCRSSQSLVHSTGNTYLHWYQQKPGKAPKLLIYAAS |
| 109 | | DLESGVPSRFSGSGSGTDFTLTISSLQPEDFATYYCQQGHTLPWTFGQGTKVEIK |
| TIGIT-211- | 1658 | DIQMTQSPSSLSASVGDRVTITCRASQTIERRLNWYQQKPGKAPKLLIYGTTSLESGV |
| 110 | | PSRFSGSGSGTDFTLTISSLQPEDFATYYCQQSYTTLWTFGQGTKVEIK |
| TIGIT-211- | 1659 | DIQMTQSPSSLSASVGDRVTITCSGDNLRGYYASWYQQKPGKAPKLLIYGTSYRYSG |
| 111 | | VPSRFSGSGSGTDFTLTISSLQPEDFATYYCQQNLAPPYTFGQGTKVEIK |
| TIGIT-211- | 1660 | DIQMTQSPSSLSASVGDRVTITCRSSQSLVHSTGNTYLHWYQQKPGKAPKLLIYAAS |
| 112 | | DLESGVPSRFSGSGSGTDFTLTISSLQPEDFATYYCQQGHTLPWTFGQGTKVEIK |
| TIGIT-211- | 1661 | DIQMTQSPSSLSASVGDRVTITCSGDKLGHTYTSWYQQKPGKAPKLLIYGKNIRPSGV |
| 113 | | PSRFSGSGSGTDFTLTISSLQPEDFATYYCQQNLAPPYTFGQGTKVEIK |
| TIGIT-211- | 1662 | DIQMTQSPSSLSASVGDRVTITCRASQSISNNLNWYQQKPGKAPKLLIYTASNLQNGV |
| 114 | | PSRFSGSGSGTDFTLTISSLQPEDFATYYCQQSNSWPYTFGQGTKVEIK |
| TIGIT-211- | 1663 | DIQMTQSPSSLSASVGDRVTITCRSSQSLVHSTGNTYLHWYQQKPGKAPKLLIYAAS |
| 115 | | DLESGVPSRFSGSGSGTDFTLTISSLQPEDFATYYCQQGHTLPWTFGQGTKVEIK |
| TIGIT-211- | 1664 | DIQMTQSPSSLSASVGDRVTITCRASQTIERRLNWYQQKPGKAPKLLIYHDNKRPSGV |
| 116 | | PSRFSGSGSGTDFTLTISSLQPEDFATYYCQQGYTLPWTFGQGTKVEIK |
| TIGIT-269-1 | 1665 | EIVLTQSPATLSLSPGERATLSCRASQSVSSGYLAWYQQKPGQAPRLLIYSTSSRATGI |
| | | PDRFSGSGSGTDFTLTISRLEPEDFAVYYCQQSASAHPGWTFGQGTKVEIK |
| TIGIT-269-2 | 1666 | DIQMTQSPSSLSASVGDRVTITCRASQSINTFLNWYQQKPGKAPKLLIYGASSLQSGV |
| | | PSRFSGSGSGTDFTLTISSLQPEDFATYYCQQGYRAPWTFGQGTKVEIK |
| TIGIT-269-3 | 1667 | DIQMTQSPSSLSASVGDRVTITCRASQSVSSYLNWYQQKPGKAPKLLIYAATSLQSGV |
| | | PSRFSGSGSGTDFTLTISSLQPEDFATYYCQQGYSTPWTFGQGTKVEIK |
| TIGIT-269-4 | 1668 | DIQMTQSPSSLSASVGDRVTITCRASQSIRTYLNWYQQKPGKAPKLLIYGASSLQSGV |
| | | PSRFSGSGSGTDFTLTISSLQPEDFATYYCQQSYRVPRSFGQGTKVEIK |
| TIGIT-269-5 | 1669 | EIVLTQSPATLSLSPGERATLSCRASQSVSSGYLAWYQQKPGQAPRLLIYDASSRATGI |
| | | PDRFSGSGSGTDFTLTISRLEPEDFAVYYCQHFGGSPLLTFGQGTKVEIK |
| TIGIT-269-6 | 1670 | DIQMTQSPSSLSASVGDRVTITCRASQHIGKYLNWYQQKPGKAPKLLIYGASSLQSG |
| | | VPSRFSGSGSGTDFTLTISSLQPEDFATYYCQQTYSPVTFGQGTKVEIK |
| TIGIT-269-7 | 1671 | DIQMTQSPSSLSASVGDRVTITCRASQSIGGYLNWYQQKPGKAPKLLIYAVSSLQSGV |
| | | PSRFSGSGSGTDFTLTISSLQPEDFATYYCQQGFYTPWTFGQGTKVEIK |
| TIGIT-269-8 | 1672 | DIQMTQSPSSLSASVGDRVTITCRASQSINTFLNWYQQKPGKAPKLLIYGASSLQSGV |
| | | PSRFSGSGSGTDFTLTISSLQPEDFATYYCQQGYRAPWTFGQGTKVEIK |
| TIGIT-269-9 | 1673 | DIQMTQSPSSLSASVGDRVTITCRASQNIGKYLNWYQQKPGKAPKLLIYAASSLQSG |
| | | VPSRFSGSGSGTDFTLTISSLQPEDFATYYCHQSYGIPWTFGQGTKVEIK |
| TIGIT-269- | 1674 | DIQMTQSPSSLSASVGDRVTITCRASQNIRNYLNWYQQKPGKAPKLLIYGASSLQSGV |
| 10 | | PSRFSGSGSGTDFTLTISSLQPEDFATYYCQQSYRSFFTFGQGTKVEIK |
| TIGIT-269- | 1675 | DIQMTQSPSSLSASVGDRVTITCRASQSIKNYLNWYQQKPGKAPKLLIYTASSLQSGV |
| 11 | | PSRFSGSGSGTDFTLTISSLQPEDFATYYCQQSYGNVWTFGQGTKVEIK |
| TIGIT-269- | 1676 | DIQMTQSPSSLSASVGDRVTITCRASQSINTFLNWYQQKPGKAPKLLIYGASSLQSGV |
| 12 | | PSRFSGSGSGTDFTLTISSLQPEDFATYYCQQGYRAPWTFGQGTKVEIK |
| TIGIT-269- | 1677 | DIQMTQSPSSLSASVGDRVTITCRASQSITRYLNWYQQKPGKAPKLLIYTTSSLQSGV |
| 13 | | PSRFSGSGSGTDFTLTISSLQPEDFATYYCLQAYSTPWTFGQGTKVEIK |
| TIGIT-269- | 1678 | DIQMTQSPSSLSASVGDRVTITCRASEKISTYLNWYQQKPGKAPKLLIYAASSLQSGV |
| 14 | | PSRFSGSGSGTDFTLTISSLQPEDFATYYCQQSHQTPWTFGQGTKVEIK |
| TIGIT-269- | 1679 | EIVLTQSPATLSLSPGERATLSCRASQSVNSNHLAWYQQKPGQAPRLLIYSTSSRATGI |
| 15 | | PDRFSGSGSGTDFTLTISRLEPEDFAVYYCQQSGSSSLTFGQGTKVEIK |
| TIGIT-269- | 1680 | DIQMTQSPSSLSASVGDRVTITCRASQSISNYLNWYQQKPGKAPKLLIYGATSLQSGV |
| 16 | | PSRFSGSGSGTDFTLTISSLQPEDFATYYCQQSYIMSQWTFGQGTKVEIK |
| TIGIT-269- | 1681 | DIQMTQSPSSLSASVGDRVTITCRASQSITRYLNWYQQKPGKAPKLLIYGASSLQSGV |
| 17 | | PSRFSGSGSGTDFTLTISSLQPEDFATYYCQQGFRAPRTFGQGTKVEIK |
| TIGIT-269- | 1682 | DIQMTQSPSSLSASVGDRVTITCRASQSVGSYLNWYQQKPGKAPKLLIYSASSLQSGV |
| 18 | | PSRFSGSGSGTDFTLTISSLQPEDFATYYCQQSHATPWTFGQGTKVEIK |
| TIGIT-269- | 1683 | EIVLTQSPATLSLSPGERATLSCRASHSVSNNYLAWYQQKPGQAPRLLIYGASSRATG |
| 19 | | IPDRFSGSGSGTDFTLTISRLEPEDFAVYYCQLFDRSRPGYTFGQGTKVEIK |
| TIGIT-269- | 1684 | DIQMTQSPSSLSASVGDRVTITCRASQSINTFLNWYQQKPGKAPKLLIYGASSLQSGV |
| 20 | | PSRFSGSGSGTDFTLTISSLQPEDFATYYCQQGYRAPWTFGQGTKVEIK |
| TIGIT-269- | 1685 | EIVLTQSPATLSLSPGERATLSCRASQSVSGTYLAWYQQKPGQAPRLLIYGASSRATG |
| 21 | | IPDRFSGSGSGTDFTLTISRLEPEDFAVYYCQQYKRSSGFTFGQGTKVEIK |
| TIGIT-471- | 2190 | DIQMTQSPSSLSASVGDRVTITCRASQTIERRLNWYQQKPGKAPKLLIYDASSLHTGV |
| 001 | | PSRFSGSGSGTDFTLTISSLQPEDFATYYCQQSYIIPPTFGQGTKVEIK |
| TIGIT-471- | 2191 | DIQMTQSPSSLSASVGDRVTITCRASHGVRTSLAWYQQKPGKAPKLLIYGKNNRPTG |
| 009 | | VPSRFSGSGSGTDFTLTISSLQPEDFATYYCQQSLAPPYTFGQGTKVEIK |
| TIGIT-471- | 2192 | DIQMTQSPSSLSASVGDRVTITCRATQAIERRLKWYQQKPGKAPKLLIYDNSSRQTGV |
| 017 | | PSRFSGSGSGTDFTLTISSLQPEDFATYYCQQSYIIPYTFGQGTKVEIK |
| TIGIT-471- | 2193 | DIQMTQSPSSLSASVGDRVTITCSASQDINKYLNWYQQKPGKAPKLLIYHTSRLQSGV |
| 025 | | PSRFSGSGSGTDFTLTISSLQPEDFATYYCQQYTYFPATFGQGTNVEIK |
| TIGIT-471- | 2194 | DIQMTQSPSSLSASVGDRVTITCRASQGVRTSLAWYQQKPGKAPKLLIYAKNNRPSG |
| 033 | | VPSRFSGSGSGTDFTLTISSLQPEDFATYYCQQSYSAPYTFGQGTKVEIK |
| TIGIT-471- | 2195 | DIQMTQSPSSLSASVGDRVTITCSASHDINEYLNWYQQKPGKAPKLLIYHTSRLQSGV |
| 041 | | PSRFSGSESVTDFTLTISSLQPEDFATYYCQQFAYFPATFGQGTKVEIK |
| TIGIT-471- | 2196 | dIQMTPSPSSLSASVGDKITITCRPAHNIGNFLNWYQQKPRKAPKLLIYKTTWLHSSVP |
| 049 | | SSISGGGSATDYTLTIISLQPADYATYYCRHRSSYLPTFGQGTKVEIK |
| TIGIT-471- | 2197 | DIQMTQSPSSLSASVGDRVTITCRASQNIRSYLNWYQQKPGKAPKLLIYGKNIRPSGV |
| 005 | | PSRFSGSGSGTDFTLTISSLQPEDFATYYCQQYASVPVTFGQGTKVEIK |
| TIGIT-471- | 2198 | DIQMTQYPSSLSASVGDRVTIICSGNKLGDKYASWFQQKPGKARKLLIYRISWLQSG |
| 013 | | VPARFSGSGSGTDFTVTISSMEREDFATYYCVARPLRGNPHVLFGQGTKVEIK |
| TIGIT-471- | 2199 | DIQMTQSPSSLSASVGDRVTITCRASQGVRTSLAWYQQKPGKAPKLLIYAKNNRPSG |
| 021 | | VPSRFSGSGSGTDFTLTISSLQPEDFATYYCQQSYSAPYTFGQGTKVEIK |
| TIGIT-471- | 2200 | DIQMTQSPSSLSASVGDRVTITCRASQGVRTSLAWYQQKPGKAPKLLIYAINNRPSGV |
| 029 | | PSRFSGSGSGTDFTLTISSLQPEDFATYYCQQSYSAPYTFGQGTKVRSK |
| TIGIT-471- | 2201 | DIQMTQSPSSLSASVGDRVTITCSASQDIRRYLNWYQQKPGKAPKLLIYHTSTLQSGV |
| 037 | | PSRFSGSGSGTDFTLTISSLQPDDFASYYCQQYRLFGQGTKVEIK |
| TIGIT-471- | 2202 | DIQMTQSPSSLSASVGDRVTITCSASQDINKYLNWYQQKPGKAPKLLIYHTSRLQSGV |
| 045 | | PSRFSGSGSGTDFTLTISSLQPEDFATYYCQQYTYFFGQGTKVEIK |
| TIGIT-471- | 2203 | DIQMTQSPSSLSASVGDRVTITCRASQNIRSYLNWYQQKPGKAPKLLIYGKNIRPSGV |
| 002 | | PSRFSGSGSGTDFTLTISSLQPEDFATYYCQQYASVPVTFGQGTKVEIK |
| TIGIT-471- | 2204 | DIQMTQSPSSLSASVGDRVTITCSAYQDINKYLNWYQQKPGKAPKLLIYHKSRLQSG |
| 010 | | VPSRFSGSGSGTDFTLTISSLQPEDFATYYCQQFAYFPATFGQGTKVEIK |
| TIGIT-471- | 2205 | DIQMTQSPSSLSASVGDRVTITCRASQTIERRLNWYQQKPGKAPKLLIYDTSSRHTGV |
| 018 | | PSRFSGSGSGTDFTLTISSLQPEDFATYYCQQSYIIPPTFGQGTKVEIK |
| TIGIT-471- | 2206 | DIQMTQSPSSLSASVGDRVTITCRASQDIGNFLNWYQQKPGKAPKLLIYRTSWLQSG |
| 026 | | VPSRFSGSGSGTDFTLTISSLQPEDFATYYCQQRSSYPPTFGQGTNVEIK |
| TIGIT-471- | 2207 | DIQMTQSPSSLSASVGDRVTITCRASQSISSYVNWYQQKPGKAPKLLIYRASTLASGV |
| 034 | | PSRFSGSGSGTDFTLTISSLQPEDFATYYCQQFAYFPATFGQGTKVEIK |
| TIGIT-471- | 2208 | DIQMTQSPSSLSASVGDRVTITCRASQVVSTSLSWYQQKPGKAPKLLIYANNNRASG |
| 042 | | VPSRFSGSGSGTDFTLTISSLQPEDFATYYCQQSYTAPYTFGQGTKVEIK |
| TIGIT-471- | 2209 | DIQMTQSPSSLSASVGDRVTITCRATQTIETSLKWYQQKPGKAPKLLIYDKNSLQTGV |
| 006 | | PSRFSGSGSGTDFTLTISSLQPEDFATYYCQQSYSTPHTFGQGTKVEIK |
| TIGIT-471- | 2210 | DIQMTQSPSSLSASVGDRVTITCRASQNIRSYLNWYQQKPGKAPKLLIYGKNIRPSGV |
| 014 | | PSRFSGSGSGTDFTLTISSLQPEDFATYYCQQYASVPVTFGQGTKVEIK |
| TIGIT-471- | 2211 | DIQMTQSPSSLSASVGDRVTITCRASQNIRSYLNWYQQKPGKAPKLLIYGKNIRPSGV |
| 022 | | PSRFSGSGSGTDFTLTISSLQPEDFATYYCQQYASVPVTFGQGTKVEIK |
| TIGIT-471- | 2212 | DIQMTQSPSSLSASVGDRVTITCCASQDINKFLNWYQQKPGKAPKLLIYHTSRLQSGV |
| 030 | | PSRFSGSGSGTDFTLTISSLQPEDFATYYCQQFASFPATFGQGTKVEIK |
| TIGIT-471- | 2213 | DIQMTQSPSSLSASVGDRVTITCRASQTIERRLNWYQQKPGKAPKLLIYDASSLHTGV |
| 038 | | SSRFSGSGSGTYFTLTISSLQAEDFATYYCQQSYIIPPTFGQGTKVEIK |
| TIGIT-471- | 2214 | DIQMTQSPSSLSASVGDRVTITCAASGFNIKDTYIHWYQQKPGKAPKLLIYGTTSLES |
| 046 | | GVPSRFSGSGSGTDFTLTISSLQPEDFATYYCQQSYSTPRTFGQGTKVEIK |
| TIGIT-471- | 2215 | DIQMTQSPSSLSASVGDRVTITCRASQTISSYLNWYQQKPGKAPKLLIYENNNRPSGV |
| 003 | | PSRFSGSGSGTDFTLTISSLQPEDFATYYCQQSYIIPPTFGQGTKVEIK |
| TIGIT-471- | 2216 | DIQMTQSPSSLSASVGDRVTITCSASQDINKYLNWYQQKPGKAPKLLIYHTSRLQSGV |
| 011 | | PSRFSGSGSGTDFTLTISSLQPEDFATYYCQQVVWRPFTFGQGTKVEIK |
| TIGIT-471- | 2217 | DIQMTQSPSSLSASVGDRVTITCRASQTIERRLNWYQQKPGKAPKLLIYDASSLHTGV |
| 019 | | PSRFSGSGSGTDFTLTISSLQPEDFATYYCQQSYIIPPTFGQGTKVEIK |
| TIGIT-471- | 2218 | DIQMTQSPSSLSASVGDRVTITCRASQTISSYLNWYQQKPGKAPKLLIYENNNRPSGV |
| 027 | | PSRFSGSGSGTDFTLTISSLQPEDFATYYCQQSYIIPPTFGQGTNVEIK |
| TIGIT-471- | 2219 | DIQMTQSPSSLSASVGDRVTITCSGDKLGHTYTSWYQQKPGKAPKLLIYRASTLASG |
| 035 | | VPSRFSGSGSGTDFTLTISSLQPEDFATYYCQQGYTLPWTFGQGTKVEIK |
| TIGIT-471- | 2220 | DIQMTQSPSSLSASVGDRVTITCRANQNIGNFLNWYQQKPGKAPKLLIYHTSRLQDW |
| 043 | | IPSRFSASVSGTDFTLTISSLQSEDCATYYCQQLAFGQGTKVEIK |
| TIGIT-471- | 2221 | DIQMTQSPSSLSASVGDRVTITCSASQDINKYLNWYQQKPGKAPKLLIYHTSRLQSGV |
| 007 | | PSRFSGSGSGTDFTLTISSLQPEDFATYYCQQFAYFPATFGQGTKVEIK |
| TIGIT-471- | 2222 | DIQMTQSPSSLSASVGDRVTITCRASHGVRTSLAWYQQKPGKAPKLLIYGKNNRPTG |
| 015 | | VPSRFSGSGSGTDFTLTISSLQPEDFATYYCQQSYSAPYTFGQGTKVEIK |
| TIGIT-471- | 2223 | DIQMTQSPSSLSASVGDRVTITCRATQSIRSFLNWYQQKPGKAPKLLIYKVSNRFSGV |
| 023 | | PSRFSGSGSGTDFTLTISSLQPEDFATYYCQQYDAYPPTLGQGTKVEIK |
| TIGIT-471- | 2224 | DIQMTQSPSSLSASVGDRVTITCRASQDIGNFLNWYQQKPGKAPKLLIYRTSWLQSG |
| 031 | | VPSRFSGSGSGTDFTLTISSLQPEDFATYYCQQRSSYSATFGQGTKVEIK |
| TIGIT-471- | 2225 | DIQMTQSPSSLSASVGDRVTITCSGNKLGDKYASWYQQKPGKAPKLLIYRTTWLQSG |
| 039 | | VPSRFSGSGSGTDFTLTISSLQPEDFATYYCVARAVRGNPLVLFGQGTKVEIK |
| TIGIT-471- | 2226 | DIQMTQSPSSLSASVGDRVTITCRASQGVRTSLAWYQQKPGKAPKLLIYGKNIRPIGV |
| 047 | | PSRFSGSGSGTDFTLTISSLQPEDFATYYCGQSYRYRLTFGQGTKVEIK |
| TIGIT-471- | 2227 | DIQMTQSPSSLSASVGDRVTITCRASQGVRTSLAWYQQKPGKAPKLLIYAKNNRPSG |
| 004 | | VPSRFSGSGSGTDFTLTISSLQPEDFATYYCQQSYSAPYTFGQGTKVEIK |
| TIGIT-471- | 2228 | DIQMTQSPSSLSASVGDRVTITCRASQRISSFLNWYQQKPGKAPKLLIYGKNIRPSGVP |
| 012 | | SRFSGSGSGTDFTLTISSLQPEDFATYYCQQSYELPLTFGQGTKVEIK |
| TIGIT-471- | 2229 | DIQMTQSPSSLSASVGDRVTITCCASQDINKYLNWYQQKPGKAPKLLIYHTSRLQSG |
| 020 | | VPSRFSGSGSGTDFTLTISSLQPEDFATYYCQQFAYFPATFGQGTKVEIK |
| TIGIT-471- | 2230 | DIQMTQSPSSLSASVGDRVTITCRASQSVDRYFNWYQQKPGKAPKLLIYAASSLYSG |
| 028 | | VPSRFSGSGSGTDFTLTISSLQPEDFATYYCQQSYRTPLTFGQGTNVEIK |
| TIGIT-471- | 2231 | DIQMTQSPSSLSASVGDRVTITCRASQNIRSYLNWYQQKPGKAPKLLIYGKNIRPSGV |
| 036 | | PSRFSGSGSGTDFTLTISSLQPEDFATYYCQQYASVPVTFGQGTKVEIK |
| TIGIT-471- | 2232 | DIHMTHSPSSLSASVGDRVTITCSASQDINKYLNWYQQKPGKAPKLLIYHTSTLQSPF |
| 044 | | PSRFSGSGSGTDFTLTISSLQPEDFATYYCQQFAYFPATFGQGTKVEIK |
| TIGIT-471- | 2233 | DIQMTQSPSSLSASVGDRVTITCRSSQSLVHSTGNTYLHWYQQKPGKAPKLLIYQMS |
| 008 | | HLASGVPSRFSGSGSGTDFTLTISSLQPEDFATYYCQQSYSAPTFGQGTKVEIK |
| TIGIT-471- | 2234 | DIQMTQSPSSLSASVGDRVTITCRASQGVRTSLAWYQQKPGKAPKLLIYAKNNRPSG |
| 016 | | VPSRFSGSGSGTDFTLTISSLQPEDFATYYCQQSYSAPYTFGQGTKVEIK |
| TIGIT-471- | 2235 | DIQMTQSPSSLSASVGDRVTITCRSSQSLVHSTGNTYLHWYQQKPGKAPKLLIYQMS |
| 024 | | HLASGVPSRFSGSGSGTDFTLTISSLQPEDFATYYCQQSYSAPTFGQGTNVEIK |
| TIGIT-471- | 2236 | DIQMTQSPSSLSASVGDRVTITCRASQGVRTSLAWYQQKPGKAPKLLIYAKNNRPSG |
| 032 | | VPSRFSGSGSGTDFTLTISSLQPEDFATYYCQQSYSVPYTFGQGTKVEIK |
| TIGIT-471- | 2237 | EIQMTQSPSSLSASVGDRVTITCRASQGVRTSLAWYQQKPRKAPKLLIYALNNRPSG |
| 040 | | VPSRFSGSGSGTDFTLTISSLQPEDFATYYCQQSYSAPYTFGQGTKVEIK |
| TIGIT-471- | 2238 | DIQMTQSPSSLSASVGDRVTITCGASQTIERRLNWYQQKPGKAPKLLIYDASSLHTGV |
| 048 | | PSRISGSGSGTDFTLTISSLQPEHFATYYCQQSYIIPPTFGQGTKVEIK |

TABLE 15

| | SEQ | |
|---|---|---|
| Variant | ID NO: | Sequence |
| TIGIT-29-01 | 1686 | MKHLWFFLLLVAAPRWVLSEVQLVESGGGLVQAGGSLRLSCAASGRTFSNYAMG |
| | | WFRQAPGKEREFVAAITWSGTRTDYADSVKGRFTISADNAKNTVYLQMNSLKPED |
| | | TAVYYCAAAAWTIYEYDYWGQGTQVTVSSGGGGSEPKSSDKTHTCPPCPAPELLG |
| | | GPSVFLFPPKPKDTLMISRTPEVTCVVVDVSHEDPEVKFNWYVDGVEVHNAKTKPR |
| | | EEQYNSTYRVVSVLTVLHQDWLNGKEYKCKVSNKALPAPIEKTISKAKGQPREPQV |
| | | YTLPPSREEMTKNQVSLTCLVKGFYPSDIAVEWESNGQPENNYKTTPPVLDSDGSFF |
| | | LYSLTVDKSRWQQGNVFSCSVMHEALHNHYTQKSLSLSPG |
| TIGIT-29-02 | 1687 | MKHLWFFLLLVAAPRWVLSEVQLVESGGGLVQAGGSLRLSCAASGRTFDIYAMG |
| | | WFRQAPGKEREWVSTISWSGGRTYYADSVKGRFTISADNAKNTVYLQMNSLKPED |
| | | TAVYYCAARPVYRTYGSWGQGTQVTVSSGGGGSEPKSSDKTHTCPPCPAPELLGGP |
| | | SVFLFPPKPKDTLMISRTPEVTCVVVDVSHEDPEVKFNWYVDGVEVHNAKTKPREE |
| | | QYNSTYRVVSVLTVLHQDWLNGKEYKCKVSNKALPAPIEKTISKAKGQPREPQVYT |
| | | LPPSREEMTKNQVSLTCLVKGFYPSDIAVEWESNGQPENNYKTTPPVLDSDGSFFLY |
| | | SKLTVDKSRWQQGNVFSCSVMHEALHNHYTQKSLSLSPG |
| TIGIT-29-03 | 1688 | MKHLWFFLLLVAAPRWVLSEVQLVESGGGLVQAGGSLRLSCAASGFTFSSYAMG |
| | | WFRQAPGKEREFVAAITWSGTRTDYADSVKGRFTISADNAKNTVYLQMNSLKPED |
| | | TAVYYCAAAAWRYSEYDYWGQGTQVTVSSGGGGSEPKSSDKTHTCPPCPAPELLG |
| | | GPSVFLFPPKPKDTLMISRTPEVTCVVVDVSHEDPEVKFNWYVDGVEVHNAKTKPR |
| | | EEQYNSTYRVVSVLTVLHQDWLNGKEYKCKVSNKALPAPIEKTISKAKGQPREPQV |
| | | YTLPPSREEMTKNQVSLTCLVKGFYPSDIAVEWESNGQPENNYKTTPPVLDSDGSFF |
| | | LYSKLTVDKSRWQQGNVFSCSVMHEALHNHYTQKSLSLSPG |
| TIGIT-29-4 | 1689 | MKHLWFFLLLVAAPRWVLSEVQLVESGGGLVQAGGSLRLSCAASGSTFDTYVMG |
| | | WFRQAPGKERELVSTISSDGDSTYYADSVKGRFTISADNAKNTVYLQMNSLKPEDT |
| | | AVYYCAAGTRRGRNYWGQGTQVTVSSGGGGSEPKSSDKTHTCPPCPAPELLGGPS |
| | | VFLFPPKPKDTLMISRTPEVTCVVVDVSHEDPEVKFNWYVDGVEVHNAKTKPREEQ |
| | | YNSTYRVVSVLTVLHQDWLNGKEYKCKVSNKALPAPIEKTISKAKGQPREPQVYTL |
| | | PPSREEMTKNQVSLTCLVKGFYPSDIAVEWESNGQPENNYKTTPPVLDSDGSFFLYS |
| | | KLTVDKSRWQQGNVFSCSVMHEALHNHYTQKSLSLSPG |
| TIGIT-29-5 | 1690 | MKHLWFFLLLVAAPRWVLSEVQLVESGGGLVQAGGSLRLSCAASGRTFSIYAMGW |
| | | FRQAPGKEREWVATISSSGDRTYYADSVKGRFTISADNAKNTVYLQMNSLKPEDTA |
| | | VYYCAARRYGRRYDYWGQGTQVTVSSGGGGSEPKSSDKTHTCPPCPAPELLGGPS |
| | | VFLFPPKPKDTLMISRTPEVTCVVVDVSHEDPEVKFNWYVDGVEVHNAKTKPREEQ |
| | | YNSTYRVVSVLTVLHQDWLNGKEYKCKVSNKALPAPIEKTISKAKGQPREPQVYTL |
| | | PPSREEMTKNQVSLTCLVKGFYPSDIAVEWESNGQPENNYKTTPPVLDSDGSFFLYS |
| | | KLTVDKSRWQQGNVFSCSVMHEALHNHYTQKSLSLSPG |
| TIGIT-29-06 | 1691 | MKHLWFFLLLVAAPRWVLSEVQLVESGGGLVQAGGSLRLSCAASGGTFRSYVMG |
| | | WFRQAPGKEREWVATINSSGSRTYYADSVKGRFTISADNAKNTVYLQMNSLKPED |
| | | TAVYYCAARPNYRDYEYWGQGTQVTVSSGGGGSEPKSSDKTHTCPPCPAPELLGG |
| | | PSVFLFPPKPKDTLMISRTPEVTCVVVDVSHEDPEVKFNWYVDGVEVHNAKTKPRE |
| | | EQYNSTYRVVSVLTVLHQDWLNGKEYKCKVSNKALPAPIEKTISKAKGQPREPQVY |
| | | TLPPSREEMTKNQVSLTCLVKGFYPSDIAVEWESNGQPENNYKTTPPVLDSDGSFFL |
| | | YSKLTVDKSRWQQGNVFSCSVMHEALHNHYTQKSLSLSPG |
| TIGIT-29-07 | 1692 | MKHLWFFLLLVAAPRWVLSEVQLVESGGGLVQAGGSLRLSCAASGSIFSNYAMGW |
| | | FRQAPGKEREFVATISRGGTRTNYADSVKGRFTISADNAKNTVYLQMNSLKPEDTA |
| | | VYYCAAAAWTIYAYNYWGQGTQVTVSSGGGGSEPKSSDKTHTCPPCPAPELLGGP |
| | | SVFLFPPKPKDTLMISRTPEVTCVVVDVSHEDPEVKFNWYVDGVEVHNAKTKPREE |
| | | QYNSTYRVVSVLTVLHQDWLNGKEYKCKVSNKALPAPIEKTISKAKGQPREPQVYT |
| | | LPPSREEMTKNQVSLTCLVKGFYPSDIAVEWESNGQPENNYKTTPPVLDSDGSFFLY |
| | | SKLTVDKSRWQQGNVFSCSVMHEALHNHYTQKSLSLSPG |
| TIGIT-29-8 | 1693 | MKHLWFFLLLVAAPRWVLSEVQLVESGGGLVQAGGSLRLSCAASGRTLDDYVMG |
| | | WFRQAPGKEREGVATISGGGDTTYYADSVKGRFTISADNAKNTVYLQMNSLKPED |
| | | TAVYYCAAVPWRWTTRRDYWGQGTQVTVSSGGGGSEPKSSDKTHTCPPCPAPELL |
| | | GGPSVFLFPPKPKDTLMISRTPEVTCVVVDVSHEDPEVKFNWYVDGVEVHNAKTKP |
| | | REEQYNSTYRVVSVLTVLHQDWLNGKEYKCKVSNKALPAPIEKTISKAKGQPREPQ |
| | | VYTLPPSREEMTKNQVSLTCLVKGFYPSDIAVEWESNGQPENNYKTTPPVLDSDGSF |
| | | FLYSKLTVDKSRWQQGNVFSCSVMHEALHNHYTQKSLSLSPG |
| TIGIT-29-9 | 1694 | MKHLWFFLLLVAAPRWVLSEVQLVESGGGLVQAGGSLRLSCAASGFTFDNYAMG |
| | | WFRQAPGKEREFVSSITWSGGRTSYADSVKGRFTISADNAKNTVYLQMNSLKPEDT |
| | | AVYYCAANAWTIYRYDYWGQGTQVTVSSGGGGSEPKSSDKTHTCPPCPAPELLGG |
| | | PSVFLFPPKPKDTLMISRTPEVTCVVVDVSHEDPEVKFNWYVDGVEVHNAKTKPRE |
| | | EQYNSTYRVVSVLTVLHQDWLNGKEYKCKVSNKALPAPIEKTISKAKGQPREPQVY |
| | | TLPPSREEMTKNQVSLTCLVKGFYPSDIAVEWESNGQPENNYKTTPPVLDSDGSFFL |
| | | YSKLTVDKSRWQQGNVFSCSVMHEALHNHYTQKSLSLSPG |
| TIGIT-29-10 | 1695 | MKHLWFFLLLVAAPRWVLSEVQLVESGGGLVQAGGSLRLSCAASGRTFSNYGMG |
| | | WFRQAPGKEREFVSGISGSGGRTSYADSVKGRFTISADNAKNTVYLQMNSLKPEDT |
| | | AVYYCAANLWYPVDRLNTGFNYWGQGTQVTVSSGGGGSEPKSSDKTHTCPPCPAP |
| | | ELLGGPSVFLFPPKPKDTLMISRTPEVTCVVVDVSHEDPEVKFNWYVDGVEVHNAK |
| | | TKPREEQYNSTYRVVSVLTVLHQDWLNGKEYKCKVSNKALPAPIEKTISKAKGQPR |
| | | EPQVYTLPPSREEMTKNQVSLTCLVKGFYPSDIAVEWESNGQPENNYKTTPPVLDS |
| | | DGSFFLYSKLTVDKSRWQQGNVFSCSVMHEALHNHYTQKSLSLSPG |
| TIGIT-29-11 | 1696 | MKHLWFFLLLVAAPRWVLSEVQLVESGGGLVQAGGSLRLSCAASGRTLSSYAMG |
| | | WFRQAPGKEREFVASITWGGGRTYYADSVKGRFTISADNAKNTVYLQMNSLKPED |
| | | TAVYYCATRLWGTWTAGDYDYWGQGTQVTVSSGGGGSEPKSSDKTHTCPPCPAP |
| | | ELLGGPSVFLFPPKPKDTLMISRTPEVTCVVVDVSHEDPEVKFNWYVDGVEVHNAK |
| | | TKPREEQYNSTYRVVSVLTVLHQDWLNGKEYKCKVSNKALPAPIEKTISKAKGQPR |
| | | EPQVYTLPPSREEMTKNQVSLTCLVKGFYPSDIAVEWESNGQPENNYKTTPPVLDS |
| | | DGSFFLYSKLTVDKSRWQQGNVFSCSVMHEALHNHYTQKSLSLSPG |
| TIGIT-29-12 | 1697 | MKHLWFFLLLVAAPRWVLSEVQLVESGGGLVQAGGSLRLSCAASGSTFSSYAMG |
| | | WFRQAPGKEREFVAAITWSGTRTNYADSVKGRFTISADNAKNTVYLQMNSLKPED |
| | | TAVYYCAAAAWTIYTYDSWGQGTQVTVSSGGGGSEPKSSDKTHTCPPCPAPELLG |
| | | GPSVFLFPPKPKDTLMISRTPEVTCVVVDVSHEDPEVKFNWYVDGVEVHNAKTKPR |
| | | EEQYNSTYRVVSVLTVLHQDWLNGKEYKCKVSNKALPAPIEKTISKAKGQPREPQV |
| | | YTLPPSREEMTKNQVSLTCLVKGFYPSDIAVEWESNGQPENNYKTTPPVLDSDGSFF |
| | | LYSKLTVDKSRWQQGNVFSCSVMHEALHNHYTQKSLSLSPG |
| TIGIT-29-13 | 1698 | MKHLWFFLLLVAAPRWVLSEVQLVESGGGLVQAGGSLRLSCAASGFIFSNYAMGW |
| | | FRQAPGKEREFVAAITWSGGRTYYADSVKGRFTISADNAKNTVYLQMNSLKPEDT |
| | | AVYYCAAAAWTIYEYDYWGQGTQVTVSSGGGGSEPKSSDKTHTCPPCPAPELLGG |
| | | PSVFLFPPKPKDTLMISRTPEVTCVVVDVSHEDPEVKFNWYVDGVEVHNAKTKPRE |
| | | EQYNSTYRVVSVLTVLHQDWLNGKEYKCKVSNKALPAPIEKTISKAKGQPREPQVY |
| | | TLPPSREEMTKNQVSLTCLVKGFYPSDIAVEWESNGQPENNYKTTPPVLDSDGSFFL |
| | | YSKLTVDKSRWQQGNVFSCSVMHEALHNHYTQKSLSLSPG |
| TIGIT-29-14 | 1699 | MKHLWFFLLLVAAPRWVLSEVQLVESGGGLVQAGGSLRLSCAASGFTFSDYVMG |
| | | WFRQAPGKEREFVSAISWSGTNTNYADSVKGRFTISADNAKNTVYLQMNSLKPEDT |
| | | AVYYCATRALRDGRGYWGQGTQVTVSSGGGGSEPKSSDKTHTCPPCPAPELLGGP |
| | | SVFLFPPKPKDTLMISRTPEVTCVVVDVSHEDPEVKFNWYVDGVEVHNAKTKPREE |
| | | QYNSTYRVVSVLTVLHQDWLNGKEYKCKVSNKALPAPIEKTISKAKGQPREPQVYT |
| | | LPPSREEMTKNQVSLTCLVKGFYPSDIAVEWESNGQPENNYKTTPPVLDSDGSFFLY |
| | | SKLTVDKSRWQQGNVFSCSVMHEALHNHYTQKSLSLSPG |
| TIGIT-29-15 | 1700 | MKHLWFFLLLVAAPRWVLSEVQLVESGGGLVQAGGSLRLSCAASGRTFDSYAMG |
| | | WFRQAPGKEREGVATISGSGGRTYYADSVKGRFTISADNAKNTVYLQMNSLKPED |
| | | TAVYYCAAAAWTIYEFDSWGQGTQVTVTSGGGGSEPKSSDKTHTCPPCPAPELLGG |
| | | PSVFLFPPKPKDTLMISRTPEVTCVVVDVSHEDPEVKFNWYVDGVEVHNAKTKPRE |
| | | EQYNSTYRVVSVLTVLHQDWLNGKEYKCKVSNKALPAPIEKTISKAKGQPREPQVY |
| | | TLPPSREEMTKNQVSLTCLVKGFYPSDIAVEWESNGQPENNYKTTPPVLDSDGSFFL |
| | | YSKLTVDKSRWQQGNVFSCSVMHEALHNHYTQKSLSLSPG |
| TIGIT-29-16 | 1701 | MKHLWFFLLLVAAPRWVLSEVQLVESGGGLVQAGGSLRLSCAASGSIFSIYAMGW |
| | | FRQAPGKEREWVATISWGGNSTYYADSVKGRFTISADNAKNTVYLQMNSLKPEDT |
| | | AVYYCAARPRFRTYGYWGQGTQVTVSSGGGGSEPKSSDKTHTCPPCPAPELLGGPS |
| | | VFLFPPKPKDTLMISRTPEVTCVVVDVSHEDPEVKFNWYVDGVEVHNAKTKPREEQ |
| | | YNSTYRVVSVLTVLHQDWLNGKEYKCKVSNKALPAPIEKTISKAKGQPREPQVYTL |
| | | PPSREEMTKNQVSLTCLVKGFYPSDIAVEWESNGQPENNYKTTPPVLDSDGSFFLYS |
| | | KLTVDKSRWQQGNVFSCSVMHEALHNHYTQKSLSLSPG |
| TIGIT-29-17 | 1702 | MKHLWFFLLLVAAPRWVLSEVQLVESGGGLVQAGGSLRLSCAASGSTLSIYAMGW |
| | | FRQAPGKERELVATISSGGGSTYYADSVKGRFTISADNAKNTVYLQMNSLKPEDTA |
| | | VYYCAAGSVYGRNYWGQGTQVTVSSGGGGSEPKSSDKTHTCPPCPAPELLGGPSV |
| | | FLFPPKPKDTLMISRTPEVTCVVVDVSHEDPEVKFNWYVDGVEVHNAKTKPREEQY |
| | | NSTYRVVSVLTVLHQDWLNGKEYKCKVSNKALPAPIEKTISKAKGQPREPQVYTLP |
| | | PSREEMTKNQVSLTCLVKGFYPSDIAVEWESNGQPENNYKTTPPVLDSDGSFFLYSK |
| | | LTVDKSRWQQGNVFSCSVMHEALHNHYTQKSLSLSPG |
| TIGIT-29-18 | 1703 | MKHLWFFLLLVAAPRWVLSEVQLVESGGGLVQAGGSLRLSCAASGSTFSNYAMG |
| | | WFRQAPGKEREFVSAINSSGSRTYYADSVKGRFTISADNAKNTVYLQMNSLKPEDT |
| | | AVYYCAARLWGTWTAGDYDYWGQGTQVTVSSGGGGSEPKSSDKTHTCPPCPAPE |
| | | LLGGPSVFLFPPKPKDTLMISRTPEVTCVVVDVSHEDPEVKFNWYVDGVEVHNAKT |
| | | KPREEQYNSTYRVVSVLTVLHQDWLNGKEYKCKVSNKALPAPIEKTISKAKGQPRE |
| | | PQVYTLPPSREEMTKNQVSLTCLVKGFYPSDIAVEWESNGQPENNYKTTPPVLDSD |
| | | GSFFLYSKLTVDKSRWQQGNVFSCSVMHEALHNHYTQKSLSLSPG |
| TIGIT-29-19 | 1704 | MKHLWFFLLLVAAPRWVLSEVQLVESGGGLVQAGGSLRLSCAASGRTFSSYAMG |
| | | WFRQAPGKEREFVATISGSFGRTYYADSVKGRFTISADNAKNTVYLQMNSLKPEDT |
| | | AVYYCAAGAWTIYEYDYWGQGTQVTVSSGGGGSEPKSSDKTHTCPPCPAPELLGG |
| | | PSVFLFPPKPKDTLMISRTPEVTCVVVDVSHEDPEVKFNWYVDGVEVHNAKTKPRE |
| | | EQYNSTYRVVSVLTVLHQDWLNGKEYKCKVSNKALPAPIEKTISKAKGQPREPQVY |
| | | TLPPSREEMTKNQVSLTCLVKGFYPSDIAVEWESNGQPENNYKTTPPVLDSDGSFFL |
| | | YSKLTVDKSRWQQGNVFSCSVMHEALHNHYTQKSLSLSPG |
| TIGIT-29-20 | 1705 | MKHLWFFLLLVAAPRWVLSEVQLVESGGGLVQAGGSLRLSCAASGSTFSIYAMGW |
| | | FRQAPGKERELVASISWSGDTTNYADSVKGRFTISADNAKNTVYLQMNSLKPEDTA |
| | | VYYCAAGSVYGRNSWGQGTQVTVTSGGGGSEPKSSDKTHTCPPCPAPELLGGPSVF |
| | | LFPPKPKDTLMISRTPEVTCVVVDVSHEDPEVKFNWYVDGVEVHNAKTKPREEQY |
| | | NSTYRVVSVLTVLHQDWLNGKEYKCKVSNKALPAPIEKTISKAKGQPREPQVYTLP |
| | | PSREEMTKNQVSLTCLVKGFYPSDIAVEWESNGQPENNYKTTPPVLDSDGSFFLYSK |
| | | LTVDKSRWQQGNVFSCSVMHEALHNHYTQKSLSLSPG |
| TIGIT-29-21 | 1706 | MKHLWFFLLLVAAPRWVLSEVQLVESGGGLVQAGGSLRLSCAASGSTFSNYAMG |
| | | WFRQAPGKERELVSAITWSSSRTYYADSVKGRFTISADNAKNTVYLQMNSLKPEDT |
| | | AVYYCAAAAWTIYNFEYWGQGTQVTVSSGGGGSEPKSSDKTHTCPPCPAPELLGG |
| | | PSVFLFPPKPKDTLMISRTPEVTCVVVDVSHEDPEVKFNWYVDGVEVHNAKTKPRE |
| | | EQYNSTYRVVSVLTVLHQDWLNGKEYKCKVSNKALPAPIEKTISKAKGQPREPQVY |
| | | TLPPSREEMTKNQVSLTCLVKGFYPSDIAVEWESNGQPENNYKTTPPVLDSDGSFFL |
| | | YSKLTVDKSRWQQGNVFSCSVMHEALHNHYTQKSLSLSPG |
| TIGIT-29-22 | 1707 | MKHLWFFLLLVAAPRWVLSEVQLVESGGGLVQAGGSLRLSCAASGSILSSYTMGW |
| | | FRQAPGKEREFVSTISRSSTRTYYADSVKGRFTISADNAKNTVYLQMNSLKPEDTAV |
| | | YYCAARLWGTWTAGDYDYWGQGTQVTVSSGGGGSEPKSSDKTHTCPPCPAPELL |
| | | GGPSVFLFPPKPKDTLMISRTPEVTCVVVDVSHEDPEVKFNWYVDGVEVHNAKTKP |
| | | REEQYNSTYRVVSVLTVLHQDWLNGKEYKCKVSNKALPAPIEKTISKAKGQPREPQ |
| | | VYTLPPSREEMTKNQVSLTCLVKGFYPSDIAVEWESNGQPENNYKTTPPVLDSDGSF |
| | | FLYSKLTVDKSRWQQGNVFSCSVMHEALHNHYTQKSLSLSPG |
| TIGIT-29-23 | 1708 | MKHLWFFLLLVAAPRWVLSEVQLVESGGGLVQAGGSLRLSCAASGSTFDIYAMGW |
| | | FRQAPGKEREFVASISSGDTNTNYADSVKGRFTISADNAKNTVYLQMNSLKHEDTA |
| | | VYYCAAGRYSGYNSWGQGTQVTVSSGGGGSEPKSSDKTHTCPPCPAPELLGGPSVF |
| | | LFPPKPKDTLMISRTPEVTCVVVDVSHEDPEVKFNWYVDGVEVHNAKTKPREEQY |
| | | NSTYRVVSVLTVLHQDWLNGKEYKCKVSNKALPAPIEKTISKAKGQPREPQVYTLP |
| | | PSREEMTKNQVSLTCLVKGFYPSDIAVEWESNGQPENNYKTTPPVLDSDGSFFLYSK |
| | | LTVDKSRWQQGNVFSCSVMHEALHNHYTQKSLSLSPG |
| TIGIT-29-24 | 1709 | MKHLWFFLLLVAAPRWVLSEVQLVESGGGLVQAGGSLRLSCAASGRTFDTYAMG |
| | | WLRQAPGKEREFVSAISTGDGSTNYADSVKGRFTISADNAKNTVYLQMNSLKPEDT |
| | | AVYYCAAARRSGRGSWGQGTQVTVTSGGGGSEPKSSDKTHTCPPCPAPELLGGPS |
| | | VFLFPPKPKDTLMISRTPEVTCVVVDVSHEDPEVKFNWYVDGVEVHNAKTKPREEQ |
| | | YNSTYRVVSVLTVLHQDWLNGKEYKCKVSNKALPAPIEKTISKAKGQPREPQVYTL |
| | | PPSREEMTKNQVSLTCLVKGFYPSDIAVEWESNGQPENNYKTTPPVLDSDGSFFLYS |
| | | KLTVDKSRWQQGNVFSCSVMHEALHNHYTQKSLSLSPG |
| TIGIT-29-25 | 1710 | MKHLWFFLLLVAAPRWVLSEVQLVESGGGLVQAGGSLRLSCAASGFTFDNYAMG |
| | | WFRQAPGKEREGVAAITWSGGRTYYADSVKGRFTISADNAKNTVYLQMNSLKPED |
| | | TAVYYCAAAAWTIYEYDSWGQGTQVTVTSGGGGSEPKSSDKTHTCPPCPAPELLG |
| | | GPSVFLFPPKPKDTLMISRTPEVTCVVVDVSHEDPEVKFNWYVDGVEVHNAKTKPR |
| | | EEQYNSTYRVVSVLTVLHQDWLNGKEYKCKVSNKALPAPIEKTISKAKGQPREPQV |
| | | YTLPPSREEMTKNQVSLTCLVKGFYPSDIAVEWESNGQPENNYKTTPPVLDSDGSFF |
| | | LYSKLTVDKSRWQQGNVFSCSVMHEALHNHYTQKSLSLSPG |
| TIGIT-29-26 | 1711 | MKHLWFFLLLVAAPRWVLSEVQLVESGGGLVQAGGSLRLSCAASGFTFDNYAMG |
| | | WFRQAPGKEREFVATITWSGTRTNYADSVKGRFTISADNAKNTVYLQMNSLKPED |
| | | TAVYYCAAAAWTIYDYDYWGQGTQVTVSSGGGGSEPKSSDKTHTCPPCPAPELLG |
| | | GPSVFLFPPKPKDTLMISRTPEVTCVVVDVSHEDPEVKFNWYVDGVEVHNAKTKPR |
| | | EEQYNSTYRVVSVLTVLHQDWLNGKEYKCKVSNKALPAPIEKTISKAKGQPREPQV |
| | | YTLPPSREEMTKNQVSLTCLVKGFYPSDIAVEWESNGQPENNYKTTPPVLDSDGSFF |
| | | LYSKLTVDKSRWQQGNVFSCSVMHEALHNHYTQKSLSLSPG |
| TIGIT-29-27 | 1712 | MKHLWFFLLLVAAPRWVLSEVQLVESGGGLVQAGGSLRLSCAASGRTFSNNVMG |
| | | WFRQAPGKEREFVAAISWGGASTNYADSVKGRFTISADNAKNTVYLQMNSLKPED |
| | | TAVYYCAAGPKTPDTRNYWGQGTQVTVSSGGGGSEPKSSDKTHTCPPCPAPELLG |
| | | GPSVFLFPPKPKDTLMISRTPEVTCVVVDVSHEDPEVKFNWYVDGVEVHNAKTKPR |
| | | EEQYNSTYRVVSVLTVLHQDWLNGKEYKCKVSNKALPAPIEKTISKAKGQPREPQV |
| | | YTLPPSREEMTKNQVSLTCLVKGFYPSDIAVEWESNGQPENNYKTTPPVLDSDGSFF |
| | | LYSKLTVDKSRWQQGNVFSCSVMHEALHNHYTQKSLSLSPG |
| TIGIT-29-28 | 1713 | MKHLWFFLLLVAAPRWVLSEVQLVESGGGLVQAGGSLRLSCAASGFIFDSYAMGW |
| | | FRQAPGKEREFVAAISWGGSNTNYADSVKGRFTISADNAKNTVYLQMNSLKPEDT |
| | | AVYYCAAVRITDGRDYWGQGTQVTVSSGGGGSEPKSSDKTHTCPPCPAPELLGGPS |
| | | VFLFPPKPKDTLMISRTPEVTCVVVDVSHEDPEVKFNWYVDGVEVHNAKTKPREEQ |
| | | YNSTYRVVSVLTVLHQDWLNGKEYKCKVSNKALPAPIEKTISKAKGQPREPQVYTL |
| | | PPSREEMTKNQVSLTCLVKGFYPSDIAVEWESNGQPENNYKTTPPVLDSDGSFFLYS |
| | | KLTVDKSRWQQGNVFSCSVMHEALHNHYTQKSLSLSPG |
| TIGIT-29-29 | 1714 | MKHLWFFLLLVAAPRWVLSEVQLVESGGGLVQAGGSLRLSCAASGRTFSNYAMG |
| | | WFRQAPGKEREFVAAITWSGTRTDYADSVKGRFTISADNAKNTVYLQMNSLKPED |
| | | TAVYYCAAAAWTIYEYDYWGQGTQVTVSSGGGGSEPKSSDKTHTCPPCPAPELLG |
| | | GPSVFLFPPKPKDTLMISRTPEVTCVVVDVSHEDPEVKFNWYVDGVEVHNAKTKPR |
| | | EEQYNSTYRVVSVLTVLHQDWLNGKEYKCKVSNKALPAPIEKTISKAKGQPREPQV |
| | | YTLPPSREEMTKNQVSLTCLVKGFYPSDIAVEWESNGQPENNYKTTPPVLDSDGSFF |
| | | LYSKLTVDKSRWQQGNVFSCSVMHEALHNHYTQKSLSLSPG |
| TIGIT-29-30 | 1715 | MKHLWFFLLLVAAPRWVLSEVQLVESGGGLVQAGGSLRLSCAASGFTFSSYAMG |
| | | WFRQAPGKEREFVAAITWSGTRTDYADSVKGRFTISADNAKNTVYLQMNSLKPED |
| | | TAVYYCAAAAWRYSEYDYWGQGTQVTVSSGGGGSEPKSSDKTHTCPPCPAPELLG |
| | | GPSVFLFPPKPKDTLMISRTPEVTCVVVDVSHEDPEVKFNWYVDGVEVHNAKTKPR |
| | | EEQYNSTYRVVSVLTVLHQDWLNGKEYKCKVSNKALPAPIEKTISKAKGQPREPQV |
| | | YTLPPSREEMTKNQVSLTCLVKGFYPSDIAVEWESNGQPENNYKTTPPVLDSDGSFF |
| | | LYSKLTVDKSRWQQGNVFSCSVMHEALHNHYTQKSLSLSPG |
| TIGIT-29-31 | 1716 | MKHLWFFLLLVAAPRWVLSEVQLVESGGGLVQAGGSLRLSCAASGFTFSIYAMGW |
| | | FRQAPGKEREWVSTISWSGGNTYYADSVKGRFTISADNAKNTVYLQMNSLKPEDT |
| | | AVYYCATRPRFRRYDSWGQGTQVTVSSGGGGSEPKSSDKTHTCPPCPAPELLGGPS |
| | | VFLFPPKPKDTLMISRTPEVTCVVVDVSHEDPEVKFNWYVDGVEVHNAKTKPREEQ |
| | | YNSTYRVVSVLTVLHQDWLNGKEYKCKVSNKALPAPIEKTISKAKGQPREPQVYTL |
| | | PPSREEMTKNQVSLTCLVKGFYPSDIAVEWESNGQPENNYKTTPPVLDSDGSFFLYS |
| | | KLTVDKSRWQQGNVFSCSVMHEALHNHYTQKSLSLSPG |
| TIGIT-29-32 | 1717 | MKHLWFFLLLVAAPRWVLSEVQLVESGGGLVQAGGSLRLSCAASGSTFDSYAMG |
| | | WFRQAPGKEREGVAAITTSGSSTYYADSVKGRFTISADNAKNTVYLQMNSLKPEDT |
| | | AVYYCAARGGVRSGSPGTYNYWGQGTQVTVSSGGGGSEPKSSDKTHTCPPCPAPE |
| | | LLGGPSVFLFPPKPKDTLMISRTPEVTCVVVDVSHEDPEVKFNWYVDGVEVHNAKT |
| | | KPREEQYNSTYRVVSVLTVLHQDWLNGKEYKCKVSNKALPAPIEKTISKAKGQPRE |
| | | PQVYTLPPSREEMTKNQVSLTCLVKGFYPSDIAVEWESNGQPENNYKTTPPVLDSD |
| | | GSFFLYSKLTVDKSRWQQGNVFSCSVMHEALHNHYTQKSLSLSPG |
| TIGIT-29-33 | 1718 | MKHLWFFLLLVAAPRWVLSEVQLVESGGGLVQAGGSLRLSCAASGFIFSTYAMGW |
| | | FRQAPGKERELVSAITRSGITTYYADSVKGRFTISADNAKNTVYLQMNSLKPEDTAV |
| | | YYCAAAAWTIYEYDYWGQGTQVTVSSGGGGSEPKSSDKTHTCPPCPAPELLGGPS |
| | | VFLFPPKPKDTLMISRTPEVTCVVVDVSHEDPEVKFNWYVDGVEVHNAKTKPREEQ |
| | | YNSTYRVVSVLTVLHQDWLNGKEYKCKVSNKALPAPIEKTISKAKGQPREPQVYTL |
| | | PPSREEMTKNQVSLTCLVKGFYPSDIAVEWESNGQPENNYKTTPPVLDSDGSFFLYS |
| | | KLTVDKSRWQQGNVFSCSVMHEALHNHYTQKSLSLSPG |
| TIGIT-29-34 | 1719 | MKHLWFFLLLVAAPRWVLSEVQLVESGGGLVQAGGSLRLSCAASGFTFRNYAMG |
| | | WFRQAPGKEREFVSSISSSSSRTSYADSVKGRFTISADNAKNTVYLQMNSLKPEDTA |
| | | VYYCAARLWGTWTAGDYDYWGQGTQVTVSSGGGGSEPKSSDKTHTCPPCPAPEL |
| | | LGGPSVFLFPPKPKDTLMISRTPEVTCVVVDVSHEDPEVKFNWYVDGVEVHNAKTK |
| | | PREEQYNSTYRVVSVLTVLHQDWLNGKEYKCKVSNKALPAPIEKTISKAKGQPREP |
| | | QVYTLPPSREEMTKNQVSLTCLVKGFYPSDIAVEWESNGQPENNYKTTPPVLDSDG |
| | | SFFLYSKLTVDKSRWQQGNVFSCSVMHEALHNHYTQKSLSLSPG |
| TIGIT-29-35 | 1720 | MKHLWFFLLLVAAPRWVLSEVQLVESGGGLVQAGGSLRLSCAASGRIFSIYTMGW |
| | | FRQAPGKEREWVATINSSGSRTYYADSVKGRFTISADNAKNTVYLQMNSLKPEDTA |
| | | VYYCAARPSYNRYDSWGQGTQVTVSSGGGGSEPKSSDKTHTCPPCPAPELLGGPSV |
| | | FLFPPKPKDTLMISRTPEVTCVVVDVSHEDPEVKFNWYVDGVEVHNAKTKPREEQY |
| | | NSTYRVVSVLTVLHQDWLNGKEYKCKVSNKALPAPIEKTISKAKGQPREPQVYTLP |
| | | PSREEMTKNQVSLTCLVKGFYPSDIAVEWESNGQPENNYKTTPPVLDSDGSFFLYSK |
| | | LTVDKSRWQQGNVFSCSVMHEALHNHYTQKSLSLSPG |
| TIGIT-29-36 | 1721 | MKHLWFFLLLVAAPRWVLSEVQLVESGGGLVQAGGSLRLSCAASGFTFSSYAMG |
| | | WFRQAPGKEREFVASITWSGTSTNYADSVKGRFTISADNAKNTVYLQMNSLKPEDT |
| | | AVYYCAAAAWTIYAYDYWGQGTQVTVSSGGGGSEPKSSDKTHTCPPCPAPELLGG |
| | | PSVFLFPPKPKDTLMISRTPEVTCVVVDVSHEDPEVKFNWYVDGVEVHNAKTKPRE |
| | | EQYNSTYRVVSVLTVLHQDWLNGKEYKCKVSNKALPAPIEKTISKAKGQPREPQVY |
| | | TLPPSREEMTKNQVSLTCLVKGFYPSDIAVEWESNGQPENNYKTTPPVLDSDGSFFL |
| | | YSKLTVDKSRWQQGNVFSCSVMHEALHNHYTQKSLSLSPG |
| TIGIT-29-37 | 1722 | MKHLWFFLLLVAAPRWVLSEVQLVESGGGLVQAGGSLRLSCAASGRTFSNYAMG |
| | | WFRQAPGKEREFVAGISWSGTRTYYADSVKGRFTISADNAKNTVYLQMNSLKPED |
| | | TAVYYCAAAAWTIYEYDYWGQGTQVTVSSGGGGSEPKSSDKTHTCPPCPAPELLG |
| | | GPSVFLFPPKPKDTLMISRTPEVTCVVVDVSHEDPEVKFNWYVDGVEVHNAKTKPR |
| | | EEQYNSTYRVVSVLTVLHQDWLNGKEYKCKVSNKALPAPIEKTISKAKGQPREPQV |
| | | YTLPPSREEMTKNQVSLTCLVKGFYPSDIAVEWESNGQPENNYKTTPPVLDSDGSFF |
| | | LYSKLTVDKSRWQQGNVFSCSVMHEALHNHYTQKSLSLSPG |
| TIGIT-29-38 | 1723 | MKHLWFFLLLVAAPRWVLSEVQLVESGGGLVQAGGSLRLSCAASGSTFSSYAMG |
| | | WFRQAPGKEREFVSAISRNGASTSYADSVKGRFTISADNAKNTVYLQMNSLKPEDT |
| | | AVYYCAAAGTRFDYWGQGTQVTVSSGGGGSEPKSSDKTHTCPPCPAPELLGGPSVF |
| | | LFPPKPKDTLMISRTPEVTCVVVDVSHEDPEVKFNWYVDGVEVHNAKTKPREEQY |
| | | NSTYRVVSVLTVLHQDWLNGKEYKCKVSNKALPAPIEKTISKAKGQPREPQVYTLP |
| | | PSREEMTKNQVSLTCLVKGFYPSDIAVEWESNGQPENNYKTTPPVLDSDGSFFLYSK |
| | | LTVDKSRWQQGNVFSCSVMHEALHNHYTQKSLSLSPG |
| TIGIT-29-39 | 1724 | MKHLWFFLLLVAAPRWVLSEVQLVESGGGLVQAGGSLRLSCAASGRTLDDYVMG |
| | | WFRQAPGKEREGVATISGGGDTTYYADSVKGRFTISADNAKNTVYLQMNSLKPED |
| | | TAVYYCAAVPWRWTTRRDYWGQGTQVTVSSGGGGSEPKSSDKTHTCPPCPAPELL |
| | | GGPSVFLFPPKPKDTLMISRTPEVTCVVVDVSHEDPEVKFNWYVDGVEVHNAKTKP |
| | | REEQYNSTYRVVSVLTVLHQDWLNGKEYKCKVSNKALPAPIEKTISKAKGQPREPQ |
| | | VYTLPPSREEMTKNQVSLTCLVKGFYPSDIAVEWESNGQPENNYKTTPPVLDSDGSF |
| | | FLYSKLTVDKSRWQQGNVFSCSVMHEALHNHYTQKSLSLSPG |
| TIGIT-29-40 | 1725 | MKHLWFFLLLVAAPRWVLSEVQLVESGGGLVQAGGSLRLSCAASGFTFDNYAMG |
| | | WFRQAPGKEREFVATITWSGTRTNYADSVKGRFTISADNAKNTVYLQMNSLKPED |
| | | TAVYYCAAAAWTIYDYDYWGQGTQVTVSSGGGGSEPKSSDKTHTCPPCPAPELLG |
| | | GPSVFLFPPKPKDTLMISRTPEVTCVVVDVSHEDPEVKFNWYVDGVEVHNAKTKPR |
| | | EEQYNSTYRVVSVLTVLHQDWLNGKEYKCKVSNKALPAPIEKTISKAKGQPREPQV |
| | | YTLPPSREEMTKNQVSLTCLVKGFYPSDIAVEWESNGQPENNYKTTPPVLDSDGSFF |
| | | LYSKLTVDKSRWQQGNVFSCSVMHEALHNHYTQKSLSLSPG |
| TIGIT-29-41 | 1726 | MKHLWFFLLLVAAPRWVLSEVQLVESGGGLVQAGGSLRLSCAASGRTFSTNAMG |
| | | WFRQAPGKEREWVTAITTSGGNTYYADSVKGRFTISADNAKNTVYLQMNSLKPED |
| | | TAVYYCAARDETYGTYDYWGQGTQVTVSSGGGGSEPKSSDKTHTCPPCPAPELLG |
| | | GPSVFLFPPKPKDTLMISRTPEVTCVVVDVSHEDPEVKFNWYVDGVEVHNAKTKPR |
| | | EEQYNSTYRVVSVLTVLHQDWLNGKEYKCKVSNKALPAPIEKTISKAKGQPREPQV |
| | | YTLPPSREEMTKNQVSLTCLVKGFYPSDIAVEWESNGQPENNYKTTPPVLDSDGSFF |
| | | LYSKLTVDKSRWQQGNVFSCSVMHEALHNHYTQKSLSLSPG |
| TIGIT-29-42 | 1727 | MKHLWFFLLLVAAPRWVLSEVQLVESGGGLVQAGGSLRLSCAASGSTFSTYAMG |
| | | WFRQAPGKEREFVATISTSSSRTYYADSVKGRFTISADNAKNTVYLQMNSLKPEDT |
| | | AVYYCAARLWGTWTAGDYDYWGQGTQVTVSLGGGGSEPKSSDKTHTCPPCPAPE |
| | | LLGGPSVFLFPPKPKDTLMISRTPEVTCVVVDVSHEDPEVKFNWYVDGVEVHNAKT |
| | | KPREEQYNSTYRVVSVLTVLHQDWLNGKEYKCKVSNKALPAPIEKTISKAKGQPRE |
| | | PQVYTLPPSREEMTKNQVSLTCLVKGFYPSDIAVEWESNGQPENNYKTTPPVLDSD |
| | | GSFFLYSKLTVDKSRWQQGNVFSCSVMHEALHNHYTQKSLSLSPG |
| TIGIT-29-43 | 1728 | MKHLWFFLLLVAAPRWVLSEVQLVESGGGLVQAGGSLRLSCAASGRTFDSYAMG |
| | | WFRQAPGKEREWVSAISWSGSSTYYADSVKGRFTISADNAKNTVYLQMNSLKPED |
| | | TAVYYCAARGGYGRYDSWGQGTQVTVTSGGGGSEPKSSDKTHTCPPCPAPELLGG |
| | | PSVFLFPPKPKDTLMISRTPEVTCVVVDVSHEDPEVKFNWYVDGVEVHNAKTKPRE |
| | | EQYNSTYRVVSVLTVLHQDWLNGKEYKCKVSNKALPAPIEKTISKAKGQPREPQVY |
| | | TLPPSREEMTKNQVSLTCLVKGFYPSDIAVEWESNGQPENNYKTTPPVLDSDGSFFL |
| | | YSKLTVDKSRWQQGNVFSCSVMHEALHNHYTQKSLSLSPG |
| TIGIT-29-44 | 1729 | MKHLWFFLLLVAAPRWVLSEVQLVESGGGLVQAGGSLRLSCAASGFTFDNYAMG |
| | | WFRQAPGKEREFVATITWSGTTTNYADSVKGRFTISADNAKNTVYLQMNSLKPEDT |
| | | AVYYCAAAAWTIYDYDYWGQGTQVTVSSGGGGSEPKSSDKTHTCPPCPAPELLGG |
| | | PSVFLFPPKPKDTLMISRTPEVTCVVVDVSHEDPEVKFNWYVDGVEVHNAKTKPRE |
| | | EQYNSTYRVVSVLTVLHQDWLNGKEYKCKVSNKALPAPIEKTISKAKGQPREPQVY |
| | | TLPPSREEMTKNQVSLTCLVKGFYPSDIAVEWESNGQPENNYKTTPPVLDSDGSFFL |
| | | YSKLTVDKSRWQQGNVFSCSVMHEALHNHYTQKSLSLSPG |
| TIGIT-29-45 | 1730 | MKHLWFFLLLVAAPRWVLSEVQLVESGGGLVQAGGSLRLSCAASGFTFSSYAMG |
| | | WFRQAPGKEREFVASITWSGTRTDYADSVKGRFTISADNAKNTVYLQMNSLKPEDT |
| | | AVYYCAAAAWTIYGYEYWGQGTQVTVSSGGGGSEPKSSDKTHTCPPCPAPELLGG |
| | | PSVFLFPPKPKDTLMISRTPEVTCVVVDVSHEDPEVKFNWYVDGVEVHNAKTKPRE |
| | | EQYNSTYRVVSVLTVLHQDWLNGKEYKCKVSNKALPAPIEKTISKAKGQPREPQVY |
| | | TLPPSREEMTKNQVSLTCLVKGFYPSDIAVEWESNGQPENNYKTTPPVLDSDGSFFL |
| | | YSKLTVDKSRWQQGNVFSCSVMHEALHNHYTQKSLSLSPG |
| TIGIT-29-46 | 1731 | MKHLWFFLLLVAAPRWVLSEVQLVESGGGLVQAGGSLRLSCAASGSTFDIYAMGW |
| | | FRQAPGKEREFVASISSGDTNTYYADSVKGRFTISADNAKNTVYLQMNSLKHEDTA |
| | | VYYCAAGRYSGYNSWGQGTQVTVSSGGGGSEPKSSDKTHTCPPCPAPELLGGPSVF |
| | | LFPPKPKDTLMISRTPEVTCVVVDVSHEDPEVKFNWYVDGVEVHNAKTKPREEQY |
| | | NSTYRVVSVLTVLHQDWLNGKEYKCKVSNKALPAPIEKTISKAKGQPREPQVYTLP |
| | | PSREEMTKNQVSLTCLVKGFYPSDIAVEWESNGQPENNYKTTPPVLDSDGSFFLYSK |
| | | LTVDKSRWQQGNVFSCSVMHEALHNHYTQKSLSLSPG |
| TIGIT-29-47 | 1732 | MKHLWFFLLLVAAPRWVLSEVQLVESGGGLVQAGGSLRLSCAASGSTLSSYAMG |
| | | WFRQAPGKERELVAAITGSGGRTYYADSVKGRFTISADNAKNTVYLQMNSLKPED |
| | | TAVYYCAANRRYSFPYWSFWYDDFDYWGQGTQVTVSSGGGGSEPKSSDKTHTCP |
| | | PCPAPELLGGPSVFLFPPKPKDTLMISRTPEVTCVVVDVSHEDPEVKFNWYVDGVE |
| | | VHNAKTKPREEQYNSTYRVVSVLTVLHQDWLNGKEYKCKVSNKALPAPIEKTISK |
| | | AKGQPREPQVYTLPPSREEMTKNQVSLTCLVKGFYPSDIAVEWESNGQPENNYKTT |
| | | PPVLDSDGSFFLYSKLTVDKSRWQQGNVFSCSVMHEALHNHYTQKSLSLSPG |
| TIGIT-30-01 | 1733 | MKHLWFFLLLVAAPRWVLSEVQLVESGGGLVQAGGSLRLSCAASGFAFSSYWMG |
| | | WFRQAPGKERELVAARNSGGNTNYADSVKGRFTISADNAKNTVYLQMNSLKPEDT |
| | | AVYYCAADVWYGSTWRNWGQGTQVTVSSGGGGSEPKSSDKTHTCPPCPAPELLG |
| | | GPSVFLFPPKPKDTLMISRTPEVTCVVVDVSHEDPEVKFNWYVDGVEVHNAKTKPR |
| | | EEQYNSTYRVVSVLTVLHQDWLNGKEYKCKVSNKALPAPIEKTISKAKGQPREPQV |
| | | YTLPPSREEMTKNQVSLTCLVKGFYPSDIAVEWESNGQPENNYKTTPPVLDSDGSFF |
| | | LYSKLTVDKSRWQQGNVFSCSVMHEALHNHYTQKSLSLSPG |
| TIGIT-30-02 | 1734 | MKHLWFFLLLVAAPRWVLSEVQLVESGGGLVQAGGSLRLSCAASGRTFGDYIMG |
| | | WFRQAPGKERELVATISGGGSTNYADSVKGRFTISADNAKNTVYLQMNSLKPEDTA |
| | | VYYCAAVFSRGPLTWGQGTQVTVSSGGGGSEPKSSDKTHTCPPCPAPELLGGPSVF |
| | | LFPPKPKDTLMISRTPEVTCVVVDVSHEDPEVKFNWYVDGVEVHNAKTKPREEQY |
| | | NSTYRVVSVLTVLHQDWLNGKEYKCKVSNKALPAPIEKTISKAKGQPREPQVYTLP |
| | | PSREEMTKNQVSLTCLVKGFYPSDIAVEWESNGQPENNYKTTPPVLDSDGSFFLYSK |
| | | LTVDKSRWQQGNVFSCSVMHEALHNHYTQKSLSLSPG |
| TIGIT-30-03 | 1735 | MKHLWFFLLLVAAPRWVLSEVQLVESGGGLVQAGGSLRLSCAASGNIFSRYIMGW |
| | | FRQAPGKEREWVAGISNGGTTKYADSVKGRFTISADNAKNTVYLQMNSLKPEDTA |
| | | VYYCAQGWKIRPTIWGQGTQVTVSSGGGGSEPKSSDKTHTCPPCPAPELLGGPSVF |
| | | LFPPKPKDTLMISRTPEVTCVVVDVSHEDPEVKFNWYVDGVEVHNAKTKPREEQY |
| | | NSTYRVVSVLTVLHQDWLNGKEYKCKVSNKALPAPIEKTISKAKGQPREPQVYTLP |
| | | PSREEMTKNQVSLTCLVKGFYPSDIAVEWESNGQPENNYKTTPPVLDSDGSFFLYSK |
| | | LTVDKSRWQQGNVFSCSVMHEALHNHYTQKSLSLSPG |
| TIGIT-30-04 | 1736 | MKHLWFFLLLVAAPRWVLSEVQLVESGGGLVQAGGSLRLSCAASGFTFSTHWMG |
| | | WFRQAPGKERELVAARNSGGNTNYADSVKGRFTISADNAKNTVYLQMNSLKPEDT |
| | | AVYYCAADVWYGSTWRNWGQGTQVTVSSGGGGSEPKSSDKTHTCPPCPAPELLG |
| | | GPSVFLFPPKPKDTLMISRTPEVTCVVVDVSHEDPEVKFNWYVDGVEVHNAKTKPR |
| | | EEQYNSTYRVVSVLTVLHQDWLNGKEYKCKVSNKALPAPIEKTISKAKGQPREPQV |
| | | YTLPPSREEMTKNQVSLTCLVKGFYPSDIAVEWESNGQPENNYKTTPPVLDSDGSFF |
| | | LYSKLTVDKSRWQQGNVFSCSVMHEALHNHYTQKSLSLSPG |
| TIGIT-30-5 | 1737 | MKHLWFFLLLVAAPRWVLSEVQLVESGGGLVQAGGSLRLSCAASGGTFRNYGMG |
| | | WFRQAPGKERELVAAISWSGVSTIYADSVKGRFTISADNAKNTVYLQMNSLKPEDT |
| | | AVYYCASSPYGPLYRSTHYYDWGQGTQVTVSSGGGGSEPKSSDKTHTCPPCPAPEL |
| | | LGGPSVFLFPPKPKDTLMISRTPEVTCVVVDVSHEDPEVKFNWYVDGVEVHNAKTK |
| | | PREEQYNSTYRVVSVLTVLHQDWLNGKEYKCKVSNKALPAPIEKTISKAKGQPREP |
| | | QVYTLPPSREEMTKNQVSLTCLVKGFYPSDIAVEWESNGQPENNYKTTPPVLDSDG |
| | | SFFLYSKLTVDKSRWQQGNVFSCSVMHEALHNHYTQKSLSLSPG |
| TIGIT-30-6 | 1738 | MKHLWFFLLLVAAPRWVLSEVQLVESGGGLVQAGGSLRLSCAASGRFSRINSMGW |
| | | FRQAPGKERELVAHIFRSGITSYASYADSVKGRFTISADNAKNTVYLQMNSLKPEDT |
| | | AVYYCAIGRGSWGQGTQVTVSSGGGGSEPKSSDKTHTCPPCPAPELLGGPSVFLFPP |
| | | KPKDTLMISRTPEVTCVVVDVSHEDPEVKFNWYVDGVEVHNAKTKPREEQYNSTY |
| | | RVVSVLTVLHQDWLNGKEYKCKVSNKALPAPIEKTISKAKGQPREPQVYTLPPSRE |
| | | EMTKNQVSLTCLVKGFYPSDIAVEWESNGQPENNYKTTPPVLDSDGSFFLYSKLTV |
| | | DKSRWQQGNVFSCSVMHEALHNHYTQKSLSLSPG |
| TIGIT-30-7 | 1739 | MKHLWFFLLLVAAPRWVLSEVQLVESGGGLVQAGGSLRLSCAASGIPASIRTMGW |
| | | FRQAPGKEREGISLITSDDGSTYYADSVKGRFTISADNAKNTVYLQMNSLKPEDTAV |
| | | YYCAWTTNRGMDWGQGTQVTVSSGGGGSEPKSSDKTHTCPPCPAPELLGGPSVFL |
| | | FPPKPKDTLMISRTPEVTCVVVDVSHEDPEVKFNWYVDGVEVHNAKTKPREEQYN |
| | | STYRVVSVLTVLHQDWLNGKEYKCKVSNKALPAPIEKTISKAKGQPREPQVYTLPP |
| | | SREEMTKNQVSLTCLVKGFYPSDIAVEWESNGQPENNYKTTPPVLDSDGSFFLYSKL |
| | | TVDKSRWQQGNVFSCSVMHEALHNHYTQKSLSLSPG |
| TIGIT-30-8 | 1740 | MKHLWFFLLLVAAPRWVLSEVQLVESGGGLVQAGGSLRLSCAASGFTMSSSWMG |
| | | WFRQAPGKEREFVATLTSGGSTNYADSVKGRFTISADNAKNTVYLQMNSLKPEDT |
| | | AVYYCAADVWYGSTWRNWGQGTQVTVSSGGGGSEPKSSDKTHTCPPCPAPELLG |
| | | GPSVFLFPPKPKDTLMISRTPEVTCVVVDVSHEDPEVKFNWYVDGVEVHNAKTKPR |
| | | EEQYNSTYRVVSVLTVLHQDWLNGKEYKCKVSNKALPAPIEKTISKAKGQPREPQV |
| | | YTLPPSREEMTKNQVSLTCLVKGFYPSDIAVEWESNGQPENNYKTTPPVLDSDGSFF |
| | | LYSKLTVDKSRWQQGNVFSCSVMHEALHNHYTQKSLSLSPG |
| TIGIT-30-9 | 1741 | MKHLWFFLLLVAAPRWVLSEVQLVESGGGLVQAGGSLRLSCAASGPISGINRMGW |
| | | FRQAPGKEREWVSTITFNGDHTYYADSVKGRFTISADNAKNTVYLQMNSLKPEDTA |
| | | VYYCAARPYTRPGSMWVSSLYDWGQGTQVTVSSGGGGSEPKSSDKTHTCPPCPAP |
| | | ELLGGPSVFLFPPKPKDTLMISRTPEVTCVVVDVSHEDPEVKFNWYVDGVEVHNAK |
| | | TKPREEQYNSTYRVVSVLTVLHQDWLNGKEYKCKVSNKALPAPIEKTISKAKGQPR |
| | | EPQVYTLPPSREEMTKNQVSLTCLVKGFYPSDIAVEWESNGQPENNYKTTPPVLDS |
| | | DGSFFLYSKLTVDKSRWQQGNVFSCSVMHEALHNHYTQKSLSLSPG |
| TIGIT-30-10 | 1742 | MKHLWFFLLLVAAPRWVLSEVQLVESGGGLVQAGGSLRLSCAASVRTFSLSDMG |
| | | WFRQAPGKEREFVGAINWLSESTYYADSVKGRFTISADNAKNTVYLQMNSLKPED |
| | | TAVYYCAAQGGVLSGWDWGQGTQVTVSSGGGGSEPKSSDKTHTCPPCPAPELLGG |
| | | PSVFLFPPKPKDTLMISRTPEVTCVVVDVSHEDPEVKFNWYVDGVEVHNAKTKPRE |
| | | EQYNSTYRVVSVLTVLHQDWLNGKEYKCKVSNKALPAPIEKTISKAKGQPREPQVY |
| | | TLPPSREEMTKNQVSLTCLVKGFYPSDIAVEWESNGQPENNYKTTPPVLDSDGSFFL |
| | | YSKLTVDKSRWQQGNVFSCSVMHEALHNHYTQKSLSLSPG |
| TIGIT-30-11 | 1743 | MKHLWFFLLLVAAPRWVLSEVQLVESGGGLVQAGGSLRLSCAASGSITSIRSMGWF |
| | | RQAPGKEREWVSSVYIFGGSTYYADSVKGRFTISADNAKNTVYLQMNSLKPEDTA |
| | | VYYCANSNKPKFDWGQGTQVTVSSGGGGSEPKSSDKTHTCPPCPAPELLGGPSVFL |
| | | FPPKPKDTLMISRTPEVTCVVVDVSHEDPEVKFNWYVDGVEVHNAKTKPREEQYN |
| | | STYRVVSVLTVLHQDWLNGKEYKCKVSNKALPAPIEKTISKAKGQPREPQVYTLPP |
| | | SREEMTKNQVSLTCLVKGFYPSDIAVEWESNGQPENNYKTTPPVLDSDGSFFLYSKL |
| | | TVDKSRWQQGNVFSCSVMHEALHNHYTQKSLSLSPG |
| TIGIT-30-12 | 1744 | MKHLWFFLLLVAAPRWVLSEVQLVESGGGLVQAGGSLRLSCAASGRTFGDYIMG |
| | | WFRQAPGKERELVASVSGGGNSDYADSVKGRFTISADNAKNTVYLQMNSLKPEDT |
| | | AVYYCAAVFSRGPLTWGQGTQVTVSSGGGGSEPKSSDKTHTCPPCPAPELLGGPSV |
| | | FLFPPKPKDTLMISRTPEVTCVVVDVSHEDPEVKFNWYVDGVEVHNAKTKPREEQY |
| | | NSTYRVVSVLTVLHQDWLNGKEYKCKVSNKALPAPIEKTISKAKGQPREPQVYTLP |
| | | PSREEMTKNQVSLTCLVKGFYPSDIAVEWESNGQPENNYKTTPPVLDSDGSFFLYSK |
| | | LTVDKSRWQQGNVFSCSVMHEALHNHYTQKSLSLSPG |
| TIGIT-30-13 | 1745 | MKHLWFFLLLVAAPRWVLSEVQLVESGGGLVQAGGSLRLSCAASGRTFSNYFMG |
| | | WFRQAPGKERESVAAINWDSARTYYADSVKGRFTISADNAKNTVYLQMNSLKPED |
| | | TAVYYCASAGRWGQGTQVTVSSGGGGSEPKSSDKTHTCPPCPAPELLGGPSVFLFP |
| | | PKPKDTLMISRTPEVTCVVVDVSHEDPEVKFNWYVDGVEVHNAKTKPREEQYNST |
| | | YRVVSVLTVLHQDWLNGKEYKCKVSNKALPAPIEKTISKAKGQPREPQVYTLPPSR |
| | | EEMTKNQVSLTCLVKGFYPSDIAVEWESNGQPENNYKTTPPVLDSDGSFFLYSKLT |
| | | VDKSRWQQGNVFSCSVMHEALHNHYTQKSLSLSPG |
| TIGIT-30-14 | 1746 | MKHLWFFLLLVAAPRWVLSEVQLVESGGGLVQAGGSLRLSCAASGPTFSIYDMGW |
| | | FRQAPGKEREFVAAITWNSGRTNYADSVKGRFTISADNAKNTVYLQMNSLKPEDT |
| | | AVYYCAAGAWSSLRKTAASWGQGTQVTVSSGGGGSEPKSSDKTHTCPPCPAPELL |
| | | GGPSVFLFPPKPKDTLMISRTPEVTCVVVDVSHEDPEVKFNWYVDGVEVHNAKTKP |
| | | REEQYNSTYRVVSVLTVLHQDWLNGKEYKCKVSNKALPAPIEKTISKAKGQPREPQ |
| | | VYTLPPSREEMTKNQVSLTCLVKGFYPSDIAVEWESNGQPENNYKTTPPVLDSDGSF |
| | | FLYSKLTVDKSRWQQGNVFSCSVMHEALHNHYTQKSLSLSPG |
| TIGIT-30-15 | 1747 | MKHLWFFLLLVAAPRWVLSEVQLVESGGGLVQAGGSLRLSCAASGFTFSGNWMG |
| | | WFRQAPGKEREWVSGISSGGGRTYYADSVKGRFTISADNAKNTVYLQMNSLKPED |
| | | TAVYYCAADVWYGSTWRNWGQGTQVTVSSGGGGSEPKSSDKTHTCPPCPAPELL |
| | | GGPSVFLFPPKPKDTLMISRTPEVTCVVVDVSHEDPEVKFNWYVDGVEVHNAKTKP |
| | | REEQYNSTYRVVSVLTVLHQDWLNGKEYKCKVSNKALPAPIEKTISKAKGQPREPQ |
| | | VYTLPPSREEMTKNQVSLTCLVKGFYPSDIAVEWESNGQPENNYKTTPPVLDSDGSF |
| | | FLYSKLTVDKSRWQQGNVFSCSVMHEALHNHYTQKSLSLSPG |
| TIGIT-30-16 | 1748 | MKHLWFFLLLVAAPRWVLSEVQLVESGGGLVQAGGSLRLSCAASGFPFSEYPMGW |
| | | FRQAPGKEREFVAVVNWNGDSTYYADSVKGRFTISADNAKNTVYLQMNSLKPEDT |
| | | AVYYCANFNRDWGQGTQVTVSSGGGGSEPKSSDKTHTCPPCPAPELLGGPSVFLFP |
| | | PKPKDTLMISRTPEVTCVVVDVSHEDPEVKFNWYVDGVEVHNAKTKPREEQYNST |
| | | YRVVSVLTVLHQDWLNGKEYKCKVSNKALPAPIEKTISKAKGQPREPQVYTLPPSR |
| | | EEMTKNQVSLTCLVKGFYPSDIAVEWESNGQPENNYKTTPPVLDSDGSFFLYSKLT |
| | | VDKSRWQQGNVFSCSVMHEALHNHYTQKSLSLSPG |
| TIGIT-30-17 | 1749 | MKHLWFFLLLVAAPRWVLSEVQLVESGGGLVQAGGSLRLSCAASGSIFNIGMGWF |
| | | RQAPGKEREWVSSIYSNGHTYYADSVKGRFTISADNAKNTVYLQMNSLKPEDTAV |
| | | YYCANSNKPKFDWGQGTQVTVSSGGGGSEPKSSDKTHTCPPCPAPELLGGPSVFLF |
| | | PPKPKDTLMISRTPEVTCVVVDVSHEDPEVKFNWYVDGVEVHNAKTKPREEQYNS |
| | | TYRVVSVLTVLHQDWLNGKEYKCKVSNKALPAPIEKTISKAKGQPREPQVYTLPPS |
| | | REEMTKNQVSLTCLVKGFYPSDIAVEWESNGQPENNYKTTPPVLDSDGSFFLYSKL |
| | | TVDKSRWQQGNVFSCSVMHEALHNHYTQKSLSLSPG |
| TIGIT-30-18 | 1750 | MKHLWFFLLLVAAPRWVLSEVQLVESGGGLVQAGGSLRLSCAASGRAFSLRTMG |
| | | WFRQAPGKEREGISLITSDDGSTYYADSVKGRFTISADNAKNTVYLQMNSLKPEDT |
| | | AVYYCAWTTNRGMDWGQGTQVTVSSGGGGSEPKSSDKTHTCPPCPAPELLGGPSV |
| | | FLFPPKPKDTLMISRTPEVTCVVVDVSHEDPEVKFNWYVDGVEVHNAKTKPREEQY |
| | | NSTYRVVSVLTVLHQDWLNGKEYKCKVSNKALPAPIEKTISKAKGQPREPQVYTLP |
| | | PSREEMTKNQVSLTCLVKGFYPSDIAVEWESNGQPENNYKTTPPVLDSDGSFFLYSK |
| | | LTVDKSRWQQGNVFSCSVMHEALHNHYTQKSLSLSPG |
| TIGIT-30-19 | 1751 | MKHLWFFLLLVAAPRWVLSEVQLVESGGGLVQAGGSLRLSCAASGRTFSSYAMM |
| | | GWFRQAPGKEREFLAIITDGSKTLYADSVKGRFTISADNAKNTVYLQMNSLKPEDT |
| | | AVYYCAAQFTLARHLVWGQGTQVTVSSGGGGSEPKSSDKTHTCPPCPAPELLGGPS |
| | | VFLFPPKPKDTLMISRTPEVTCVVVDVSHEDPEVKFNWYVDGVEVHNAKTKPREEQ |
| | | YNSTYRVVSVLTVLHQDWLNGKEYKCKVSNKALPAPIEKTISKAKGQPREPQVYTL |
| | | PPSREEMTKNQVSLTCLVKGFYPSDIAVEWESNGQPENNYKTTPPVLDSDGSFFLYS |
| | | KLTVDKSRWQQGNVFSCSVMHEALHNHYTQKSLSLSPG |
| TIGIT-30-20 | 1752 | MKHLWFFLLLVAAPRWVLSEVQLVESGGGLVQAGGSLRLSCAASGPTFSIYDMGW |
| | | FRQAPGKEREFVAVINWSRGSTFYADSVKGRFTISADNAKNTVYLQMNSLKPEDTA |
| | | VYYCAAGVWSSLRHTAANWGQGTQVTVSSGGGGSEPKSSDKTHTCPPCPAPELLG |
| | | GPSVFLFPPKPKDTLMISRTPEVTCVVVDVSHEDPEVKFNWYVDGVEVHNAKTKPR |
| | | EEQYNSTYRVVSVLTVLHQDWLNGKEYKCKVSNKALPAPIEKTISKAKGQPREPQV |
| | | YTLPPSREEMTKNQVSLTCLVKGFYPSDIAVEWESNGQPENNYKTTPPVLDSDGSFF |
| | | LYSKLTVDKSRWQQGNVFSCSVMHEALHNHYTQKSLSLSPG |
| TIGIT-30-21 | 1753 | MKHLWFFLLLVAAPRWVLSEVQLVESGGGLVQAGGSLRLSCAASGFTFSTSWMG |
| | | WFRQAPGKERELVATINSGGGTNYADSVKGRFTISADNAKNTVYLQMNSLKPEDT |
| | | AVYYCAADVWYGSTWRNWGQGTQVTVSSGGGGSEPKSSDKTHTCPPCPAPELLG |
| | | GPSVFLFPPKPKDTLMISRTPEVTCVVVDVSHEDPEVKFNWYVDGVEVHNAKTKPR |
| | | EEQYNSTYRVVSVLTVLHQDWLNGKEYKCKVSNKALPAPIEKTISKAKGQPREPQV |
| | | YTLPPSREEMTKNQVSLTCLVKGFYPSDIAVEWESNGQPENNYKTTPPVLDSDGSFF |
| | | LYSKLTVDKSRWQQGNVFSCSVMHEALHNHYTQKSLSLSPG |
| TIGIT-30-22 | 1754 | MKHLWFFLLLVAAPRWVLSEVQLVESGGGLVQAGGSLRLSCAASGFTLSGNWMG |
| | | WFRQAPGKEREFVASISSSGVSKHYADSVKGRFTISADNAKNTVYLQMNSLKPEDT |
| | | AVYYCAADVWYGSTWRNWGRGTQVTVSSGGGGSEPKSSDKTHTCPPCPAPELLG |
| | | GPSVFLFPPKPKDTLMISRTPEVTCVVVDVSHEDPEVKFNWYVDGVEVHNAKTKPR |
| | | EEQYNSTYRVVSVLTVLHQDWLNGKEYKCKVSNKALPAPIEKTISKAKGQPREPQV |
| | | YTLPPSREEMTKNQVSLTCLVKGFYPSDIAVEWESNGQPENNYKTTPPVLDSDGSFF |
| | | LYSKLTVDKSRWQQGNVFSCSVMHEALHNHYTQKSLSLSPG |
| TIGIT-30-23 | 1755 | MKHLWFFLLLVAAPRWVLSEVQLVESGGGLVQAGGSLRLSCAASGRAFRRYTMG |
| | | WFRQAPGKEREFVAAIRWSGGTTFYADSVKGRFTISADNAKNTVYLQMNSLKPED |
| | | TAVYYCAAEWAAMKDWGQGTQVTVSSGGGGSEPKSSDKTHTCPPCPAPELLGGPS |
| | | VFLFPPKPKDTLMISRTPEVTCVVVDVSHEDPEVKFNWYVDGVEVHNAKTKPREEQ |
| | | YNSTYRVVSVLTVLHQDWLNGKEYKCKVSNKALPAPIEKTISKAKGQPREPQVYTL |
| | | PPSREEMTKNQVSLTCLVKGFYPSDIAVEWESNGQPENNYKTTPPVLDSDGSFFLYS |
| | | KLTVDKSRWQQGNVFSCSVMHEALHNHYTQKSLSLSPG |
| TIGIT-30-24 | 1756 | MKHLWFFLLLVAAPRWVLSEVQLVESGGGLVQAGGSLRLSCAASGNIFSRYIMGW |
| | | FRQAPGKEREWVAGISNGGTTKYADSVKGRFTISADNAKNTVYLQMNSLKPEDTA |
| | | VYYCAQGWKIIPTDWGQGTQVTVSSGGGGSEPKSSDKTHTCPPCPAPELLGGPSVF |
| | | LFPPKPKDTLMISRTPEVTCVVVDVSHEDPEVKFNWYVDGVEVHNAKTKPREEQY |
| | | NSTYRVVSVLTVLHQDWLNGKEYKCKVSNKALPAPIEKTISKAKGQPREPQVYTLP |
| | | PSREEMTKNQVSLTCLVKGFYPSDIAVEWESNGQPENNYKTTPPVLDSDGSFFLYSK |
| | | LTVDKSRWQQGNVFSCSVMHEALHNHYTQKSLSLSPG |
| TIGIT-30-25 | 1757 | MKHLWFFLLLVAAPRWVLSEVQLVESGGGLVQAGGSLRLSCAASGPTFSIYDMGW |
| | | FRQAPGKEREFVASTIWSRGDTYYADSVKGRFTISADNAKNTVYLQMNSLKPEDTA |
| | | VYYCAAGVWSSLRHTAANWGQGTQVTVSSGGGGSEPKSSDKTHTCPPCPAPELLG |
| | | GPSVFLFPPKPKDTLMISRTPEVTCVVVDVSHEDPEVKFNWYVDGVEVHNAKTKPR |
| | | EEQYNSTYRVVSVLTVLHQDWLNGKEYKCKVSNKALPAPIEKTISKAKGQPREPQV |
| | | YTLPPSREEMTKNQVSLTCLVKGFYPSDIAVEWESNGQPENNYKTTPPVLDSDGSFF |
| | | LYSKLTVDKSRWQQGNVFSCSVMHEALHNHYTQKSLSLSPG |
| TIGIT-30-26 | 1758 | MKHLWFFLLLVAAPRWVLSEVQLVESGGGLVQAGGSLRLSCAASGRTYYAMGWF |
| | | RQAPGKEREFLAIITDGSKTLYADSVKGRFTISADNAKNTVYLQMNSLKPEDTAVY |
| | | YCAAQFTLARHLVWGQGTQVTVSSGGGGSEPKSSDKTHTCPPCPAPELLGGPSVFL |
| | | FPPKPKDTLMISRTPEVTCVVVDVSHEDPEVKFNWYVDGVEVHNAKTKPREEQYN |
| | | STYRVVSVLTVLHQDWLNGKEYKCKVSNKALPAPIEKTISKAKGQPREPQVYTLPP |
| | | SREEMTKNQVSLTCLVKGFYPSDIAVEWESNGQPENNYKTTPPVLDSDGSFFLYSKL |
| | | TVDKSRWQQGNVFSCSVMHEALHNHYTQKSLSLSPG |
| TIGIT-30-27 | 1759 | MKHLWFFLLLVAAPRWVLSEVQLVESGGGLVQAGGSLRLSCAASGFTFSTSWMG |
| | | WFRQAPGKEREFVAGILSDGRELYADSVKGRFTISADNAKNTVYLQMNSLKPEDTA |
| | | VYYCAADVWYGSTWRNWGQGTQVTVSSGGGGSEPKSSDKTHTCPPCPAPELLGGP |
| | | SVFLFPPKPKDTLMISRTPEVTCVVVDVSHEDPEVKFNWYVDGVEVHNAKTKPREE |
| | | QYNSTYRVVSVLTVLHQDWLNGKEYKCKVSNKALPAPIEKTISKAKGQPREPQVYT |
| | | LPPSREEMTKNQVSLTCLVKGFYPSDIAVEWESNGQPENNYKTTPPVLDSDGSFFLY |
| | | SKLTVDKSRWQQGNVFSCSVMHEALHNHYTQKSLSLSPG |
| TIGIT-30-28 | 1760 | MKHLWFFLLLVAAPRWVLSEVQLVESGGGLVQAGGSLRLSCAASGRTFESYRMG |
| | | WFRQAPGKEREFVGGINWSGRTYYADSVKGRFTISADNAKNTVYLQMNSLKPEDT |
| | | AVYYCAARRLYSGSYLDWGQGTQVTVSSGGGGSEPKSSDKTHTCPPCPAPELLGGP |
| | | SVFLFPPKPKDTLMISRTPEVTCVVVDVSHEDPEVKFNWYVDGVEVHNAKTKPREE |
| | | QYNSTYRVVSVLTVLHQDWLNGKEYKCKVSNKALPAPIEKTISKAKGQPREPQVYT |
| | | LPPSREEMTKNQVSLTCLVKGFYPSDIAVEWESNGQPENNYKTTPPVLDSDGSFFLY |
| | | SKLTVDKSRWQQGNVFSCSVMHEALHNHYTQKSLSLSPG |
| TIGIT-30-29 | 1761 | MKHLWFFLLLVAAPRWVLSEVQLVESGGGLVQAGGSLRLSCAASGSSLSFNAMG |
| | | WFRQAPGKEREWVSSVYIFGGSTYYADSVKGRFTISADNAKNTVYLQMNSLKPED |
| | | TAVYYCANSNKPKFDWGQGTQVTVSSGGGGSEPKSSDKTHTCPPCPAPELLGGPSV |
| | | FLFPPKPKDTLMISRTPEVTCVVVDVSHEDPEVKFNWYVDGVEVHNAKTKPREEQY |
| | | NSTYRVVSVLTVLHQDWLNGKEYKCKVSNKALPAPIEKTISKAKGQPREPQVYTLP |
| | | PSREEMTKNQVSLTCLVKGFYPSDIAVEWESNGQPENNYKTTPPVLDSDGSFFLYSK |
| | | LTVDKSRWQQGNVFSCSVMHEALHNHYTQKSLSLSPG |
| TIGIT-30-30 | 1762 | MKHLWFFLLLVAAPRWVLSEVQLVESGGGLVQAGGSLRLSCAASGGTFSGRGMG |
| | | WFRQAPGKEREWVSSVYIFGGSTYYADSVKGRFTISADNAKNTVYLQMNSLKPED |
| | | TAVYYCANSNKPKFDWGQGTQVTVSSGGGGSEPKSSDKTHTCPPCPAPELLGGPSV |
| | | FLFPPKPKDTLMISRTPEVTCVVVDVSHEDPEVKFNWYVDGVEVHNAKTKPREEQY |
| | | NSTYRVVSVLTVLHQDWLNGKEYKCKVSNKALPAPIEKTISKAKGQPREPQVYTLP |
| | | PSREEMTKNQVSLTCLVKGFYPSDIAVEWESNGQPENNYKTTPPVLDSDGSFFLYSK |
| | | LTVDKSRWQQGNVFSCSVMHEALHNHYTQKSLSLSPG |
| TIGIT-30-31 | 1763 | MKHLWFFLLLVAAPRWVLSEVQLVESGGGLVQAGGSLRLSCAASGPTFSWTMMG |
| | | WFRQAPGKEREFLAIITDGSKTLYADSVKGRFTISADNAKNTVYLQMNSLKPEDTA |
| | | VYYCAAQFTLARHLVWGQGTQVTVSSGGGGSEPKSSDKTHTCPPCPAPELLGGPSV |
| | | FLFPPKPKDTLMISRTPEVTCVVVDVSHEDPEVKFNWYVDGVEVHNAKTKPREEQY |
| | | NSTYRVVSVLTVLHQDWLNGKEYKCKVSNKALPAPIEKTISKAKGQPREPQVYTLP |
| | | PSREEMTKNQVSLTCLVKGFYPSDIAVEWESNGQPENNYKTTPPVLDSDGSFFLYSK |
| | | LTVDKSRWQQGNVFSCSVMHEALHNHYTQKSLSLSPG |
| TIGIT-30-32 | 1764 | MKHLWFFLLLVAAPRWVLSEVQLVESGGGLVQAGGSLRLSCAASGIIGTIRTMGWF |
| | | RQAPGKEREGISLITSDDGSTYYADSVKGRFTISADNAKNTVYLQMNSLKPEDTAV |
| | | YYCAWTTNRGMDWGQGTQVTVSSGGGGSEPKSSDKTHTCPPCPAPELLGGPSVFL |
| | | FPPKPKDTLMISRTPEVTCVVVDVSHEDPEVKFNWYVDGVEVHNAKTKPREEQYN |
| | | STYRVVSVLTVLHQDWLNGKEYKCKVSNKALPAPIEKTISKAKGQPREPQVYTLPP |
| | | SREEMTKNQVSLTCLVKGFYPSDIAVEWESNGQPENNYKTTPPVLDSDGSFFLYSKL |
| | | TVDKSRWQQGNVFSCSVMHEALHNHYTQKSLSLSPG |
| TIGIT-30-33 | 1765 | MKHLWFFLLLVAAPRWVLSEVQLVESGGGLVQAGGSLRLSCAASGFTLENNMMG |
| | | WFRQAPGKERELVSAIGWSGASTYYADSVKGRFTISADNAKNTVYLQMNSLKPED |
| | | TAVYYCAANLRGDNWGQGTQVTVSSGGGGSEPKSSDKTHTCPPCPAPELLGGPSV |
| | | FLFPPKPKDTLMISRTPEVTCVVVDVSHEDPEVKFNWYVDGVEVHNAKTKPREEQY |
| | | NSTYRVVSVLTVLHQDWLNGKEYKCKVSNKALPAPIEKTISKAKGQPREPQVYTLP |
| | | PSREEMTKNQVSLTCLVKGFYPSDIAVEWESNGQPENNYKTTPPVLDSDGSFFLYSK |
| | | LTVDKSRWQQGNVFSCSVMHEALHNHYTQKSLSLSPG |
| TIGIT-30-34 | 1766 | MKHLWFFLLLVAAPRWVLSEVQLVESGGGLVQAGGSLRLSCAASGNIFSRYIMGW |
| | | FRQAPGKEREWVAGISSGGTTKYADSVKGRFTISADNAKNTVYLQMNSLKPEDTA |
| | | VYYCAQGWKIVPTNWGQGTQVTVSSGGGGSEPKSSDKTHTCPPCPAPELLGGPSVF |
| | | LFPPKPKDTLMISRTPEVTCVVVDVSHEDPEVKFNWYVDGVEVHNAKTKPREEQY |
| | | NSTYRVVSVLTVLHQDWLNGKEYKCKVSNKALPAPIEKTISKAKGQPREPQVYTLP |
| | | PSREEMTKNQVSLTCLVKGFYPSDIAVEWESNGQPENNYKTTPPVLDSDGSFFLYSK |
| | | LTVDKSRWQQGNVFSCSVMHEALHNHYTQKSLSLSPG |
| TIGIT-30-35 | 1767 | MKHLWFFLLLVAAPRWVLSEVQLVESGGGLVQAGGSLRLSCAASGNIDRLYAMG |
| | | WFRQAPGKEREGISLITSDDGSTYYADSVKGRFTISADNAKNTVYLQMNSLKPEDT |
| | | AVYYCASSGPADARNGERWAWGQGTQVTVSSGGGGSEPKSSDKTHTCPPCPAPEL |
| | | LGGPSVFLFPPKPKDTLMISRTPEVTCVVVDVSHEDPEVKFNWYVDGVEVHNAKTK |
| | | PREEQYNSTYRVVSVLTVLHQDWLNGKEYKCKVSNKALPAPIEKTISKAKGQPREP |
| | | QVYTLPPSREEMTKNQVSLTCLVKGFYPSDIAVEWESNGQPENNYKTTPPVLDSDG |
| | | SFFLYSKLTVDKSRWQQGNVFSCSVMHEALHNHYTQKSLSLSPG |
| TIGIT-30-36 | 1768 | MKHLWFFLLLVAAPRWVLSEVQLVESGGGLVQAGGSLRLSCAASGSIASTHAIGWF |
| | | RQAPGKEREWVSSVYIFGGSTYYADSVKGRFTISADNAKNTVYLQMNSLKPEDTA |
| | | VYYCANSNKPKFDWGQGTQVTVSSGGGGSEPKSSDKTHTCPPCPAPELLGGPSVFL |
| | | FPPKPKDTLMISRTPEVTCVVVDVSHEDPEVKFNWYVDGVEVHNAKTKPREEQYN |
| | | STYRVVSVLTVLHQDWLNGKEYKCKVSNKALPAPIEKTISKAKGQPREPQVYTLPP |
| | | SREEMTKNQVSLTCLVKGFYPSDIAVEWESNGQPENNYKTTPPVLDSDGSFFLYSKL |
| | | TVDKSRWQQGNVFSCSVMHEALHNHYTQKSLSLSPG |
| TIGIT-30-37 | 1769 | MKHLWFFLLLVAAPRWVLSEVQLVESGGGLVQAGGSLRLSCAASGRTFSSKAMG |
| | | WFRQAPGKEREWVSSVYIFGGSTYYADSVKGRFTISADNAKNTVYLQMNSLKPED |
| | | TAVYYCANSNKPKFDWGQGTQVTVSSGGGGSEPKSSDKTHTCPPCPAPELLGGPSV |
| | | FLFPPKPKDTLMISRTPEVTCVVVDVSHEDPEVKFNWYVDGVEVHNAKTKPREEQY |
| | | NSTYRVVSVLTVLHQDWLNGKEYKCKVSNKALPAPIEKTISKAKGQPREPQVYTLP |
| | | PSREEMTKNQVSLTCLVKGFYPSDIAVEWESNGQPENNYKTTPPVLDSDGSFFLYSK |
| | | LTVDKSRWQQGNVFSCSVMHEALHNHYTQKSLSLSPG |
| TIGIT-30-38 | 1770 | MKHLWFFLLLVAAPRWVLSEVQLVESGGGLVQAGGSLRLSCAASGSIASFNAMGW |
| | | FRQAPGKEREWVSSVYIFGGSTYYADSVKGRFTISADNAKNTVYLQMNSLKPEDTA |
| | | VYYCANSNKPKFDWGQGTQVTVSSGGGGSEPKSSDKTHTCPPCPAPELLGGPSVFL |
| | | FPPKPKDTLMISRTPEVTCVVVDVSHEDPEVKFNWYVDGVEVHNAKTKPREEQYN |
| | | STYRVVSVLTVLHQDWLNGKEYKCKVSNKALPAPIEKTISKAKGQPREPQVYTLPP |
| | | SREEMTKNQVSLTCLVKGFYPSDIAVEWESNGQPENNYKTTPPVLDSDGSFFLYSKL |
| | | TVDKSRWQQGNVFSCSVMHEALHNHYTQKSLSLSPG |
| TIGIT-30-39 | 1771 | MKHLWFFLLLVAAPRWVLSEVQLVESGGGLVQAGGSLRLSCAASGFTFSTSWMG |
| | | WFRQAPGKEREWVVGISSGGSTHYADSVKGRFTISADNAKNTVYLQMNSLKPEDT |
| | | AVYYCAADVWYGSTWRNWGQGTQVTVSSGGGGSEPKSSDKTHTCPPCPAPELLG |
| | | GPSVFLFPPKPKDTLMISRTPEVTCVVVDVSHEDPEVKFNWYVDGVEVHNAKTKPR |
| | | EEQYNSTYRVVSVLTVLHQDWLNGKEYKCKVSNKALPAPIEKTISKAKGQPREPQV |
| | | YTLPPSREEMTKNQVSLTCLVKGFYPSDIAVEWESNGQPENNYKTTPPVLDSDGSFF |
| | | LYSKLTVDKSRWQQGNVFSCSVMHEALHNHYTQKSLSLSPG |
| TIGIT-30-40 | 1772 | MKHLWFFLLLVAAPRWVLSEVQLVESGGGLVQAGGSLRLSCAASGFTFSGNWMG |
| | | WFRQAPGKEREWVVGISSGGSTHYADSVKGRFTISADNAKNTVYLQMNSLKPEDT |
| | | AVYYCAADVWYGSTWRNWGQGTQVTVSSGGGGSEPKSSDKTHTCPPCPAPELLG |
| | | GPSVFLFPPKPKDTLMISRTPEVTCVVVDVSHEDPEVKFNWYVDGVEVHNAKTKPR |
| | | EEQYNSTYRVVSVLTVLHQDWLNGKEYKCKVSNKALPAPIEKTISKAKGQPREPQV |
| | | YTLPPSREEMTKNQVSLTCLVKGFYPSDIAVEWESNGQPENNYKTTPPVLDSDGSFF |
| | | LYSKLTVDKSRWQQGNVFSCSVMHEALHNHYTQKSLSLSPG |
| TIGIT-30-41 | 1773 | MKHLWFFLLLVAAPRWVLSEVQLVESGGGLVQAGGSLRLSCAASGRTFSSYAMM |
| | | GWFRQAPGKEREFLAIITDGSKTLYADSVKGRFTISADNAKNTVYLQMNSLKPEDT |
| | | AVYYCAAQFILARHLVWGQGTQVTVSSGGGGSEPKSSDKTHTCPPCPAPELLGGPS |
| | | VFLFPPKPKDTLMISRTPEVTCVVVDVSHEDPEVKFNWYVDGVEVHNAKTKPREEQ |
| | | YNSTYRVVSVLTVLHQDWLNGKEYKCKVSNKALPAPIEKTISKAKGQPREPQVYTL |
| | | PPSREEMTKNQVSLTCLVKGFYPSDIAVEWESNGQPENNYKTTPPVLDSDGSFFLYS |
| | | KLTVDKSRWQQGNVFSCSVMHEALHNHYTQKSLSLSPG |
| TIGIT-30-42 | 1774 | MKHLWFFLLLVAAPRWVLSEVQLVESGGGLVQAGGSLRLSCAASGITITTEVMGW |
| | | FRQAPGKEREYVAAIHWNGDSTAYADSVKGRFTISADNAKNTVYLQMNSLKPEDT |
| | | AVYYCAQVSQWRAWGQGTQVTVSSGGGGSEPKSSDKTHTCPPCPAPELLGGPSVF |
| | | LFPPKPKDTLMISRTPEVTCVVVDVSHEDPEVKFNWYVDGVEVHNAKTKPREEQY |
| | | NSTYRVVSVLTVLHQDWLNGKEYKCKVSNKALPAPIEKTISKAKGQPREPQVYTLP |
| | | PSREEMTKNQVSLTCLVKGFYPSDIAVEWESNGQPENNYKTTPPVLDSDGSFFLYSK |
| | | LTVDKSRWQQGNVFSCSVMHEALHNHYTQKSLSLSPG |
| TIGIT-30-43 | 1775 | MKHLWFFLLLVAAPRWVLSEVQLVESGGGLVQAGGSLRLSCAASGFTFSTSWMG |
| | | WFRQAPGKERELVAARNSGGNTNYADSVKGRFTISADNAKNTVYLQMNSLKPEDT |
| | | AVYYCAADVWYGSTWRNWGQGTQVTVSSGGGGSEPKSSDKTHTCPPCPAPELLG |
| | | GPSVFLFPPKPKDTLMISRTPEVTCVVVDVSHEDPEVKFNWYVDGVEVHNAKTKPR |
| | | EEQYNSTYRVVSVLTVLHQDWLNGKEYKCKVSNKALPAPIEKTISKAKGQPREPQV |
| | | YTLPPSREEMTKNQVSLTCLVKGFYPSDIAVEWESNGQPENNYKTTPPVLDSDGSFF |
| | | LYSKLTVDKSRWQQGNVFSCSVMHEALHNHYTQKSLSLSPG |
| TIGIT-30-44 | 1776 | MKHLWFFLLLVAAPRWVLSEVQLVESGGGLVQAGGSLRLSCAASGVTLDLYAMG |
| | | WFRQAPGKEREFVAGIWRSGGSTVYADSVKGRFTISADNAKNTVYLQMNSLKPED |
| | | TAVYYCATWTTTWGRNRDWGQGTQVTVSSGGGGSEPKSSDKTHTCPPCPAPELLG |
| | | GPSVFLFPPKPKDTLMISRTPEVTCVVVDVSHEDPEVKFNWYVDGVEVHNAKTKPR |
| | | EEQYNSTYRVVSVLTVLHQDWLNGKEYKCKVSNKALPAPIEKTISKAKGQPREPQV |
| | | YTLPPSREEMTKNQVSLTCLVKGFYPSDIAVEWESNGQPENNYKTTPPVLDSDGSFF |
| | | LYSKLTVDKSRWQQGNVFSCSVMHEALHNHYTQKSLSLSPG |
| TIGIT-30-45 | 1777 | MKHLWFFLLLVAAPRWVLSEVQLVESGGGLVQAGGSLRLSCAASGGTFSGGFMG |
| | | WFRQAPGKEREWVASVLRGGYTWYADSVKGRFTISADNAKNTVYLQMNSLKPED |
| | | TAVYYCANGGSSYWGQGTQVTVSSGGGGSEPKSSDKTHTCPPCPAPELLGGPSVFL |
| | | FPPKPKDTLMISRTPEVTCVVVDVSHEDPEVKFNWYVDGVEVHNAKTKPREEQYN |
| | | STYRVVSVLTVLHQDWLNGKEYKCKVSNKALPAPIEKTISKAKGQPREPQVYTLPP |
| | | SREEMTKNQVSLTCLVKGFYPSDIAVEWESNGQPENNYKTTPPVLDSDGSFFLYSKL |
| | | TVDKSRWQQGNVFSCSVMHEALHNHYTQKSLSLSPG |
| TIGIT-30-46 | 1778 | MKHLWFFLLLVAAPRWVLSEVQLVESGGGLVQAGGSLRLSCAASGRTFSTYASM |
| | | WWFRQAPGKEREFLAIITDGSKTLYADSVKGRFTISADNAKNTVYLQMNSLKPEDT |
| | | AVYYCAGSWSYPGLTWGQGTQVTVSSGGGGSEPKSSDKTHTCPPCPAPELLGGPSV |
| | | FLFPPKPKDTLMISRTPEVTCVVVDVSHEDPEVKFNWYVDGVEVHNAKTKPREEQY |
| | | NSTYRVVSVLTVLHQDWLNGKEYKCKVSNKALPAPIEKTISKAKGQPREPQVYTLP |
| | | PSREEMTKNQVSLTCLVKGFYPSDIAVEWESNGQPENNYKTTPPVLDSDGSFFLYSK |
| | | LTVDKSRWQQGNVFSCSVMHEALHNHYTQKSLSLSPG |
| TIGIT-30-47 | 1779 | MKHLWFFLLLVAAPRWVLSEVQLVESGGGLVQAGGSLRLSCAASGFTMSSSWMG |
| | | WFRQAPGKEREWVVGISSGGSTHYADSVKGRFTISADNAKNTVYLQMNSLKPEDT |
| | | AVYYCAADVWYGSTWRNWGQGTQVTVSSGGGGSEPKSSDKTHTCPPCPAPELLG |
| | | GPSVFLFPPKPKDTLMISRTPEVTCVVVDVSHEDPEVKFNWYVDGVEVHNAKTKPR |
| | | EEQYNSTYRVVSVLTVLHQDWLNGKEYKCKVSNKALPAPIEKTISKAKGQPREPQV |
| | | YTLPPSREEMTKNQVSLTCLVKGFYPSDIAVEWESNGQPENNYKTTPPVLDSDGSFF |
| | | LYSKLTVDKSRWQQGNVFSCSVMHEALHNHYTQKSLSLSPG |
| TIGIT-30-48 | 1780 | MKHLWFFLLLVAAPRWVLSEVQLVESGGGLVQAGGSLRLSCAASGFPVNRYSMG |
| | | WFRQAPGKERELVSAIGWSGASTYYADSVKGRFTISADNAKNTVYLQMNSLKPED |
| | | TAVYYCAADFWLARLRVADDYDWGQGTQVTVSSGGGGSEPKSSDKTHTCPPCPAP |
| | | ELLGGPSVFLFPPKPKDTLMISRTPEVTCVVVDVSHEDPEVKFNWYVDGVEVHNAK |
| | | TKPREEQYNSTYRVVSVLTVLHQDWLNGKEYKCKVSNKALPAPIEKTISKAKGQPR |
| | | EPQVYTLPPSREEMTKNQVSLTCLVKGFYPSDIAVEWESNGQPENNYKTTPPVLDS |
| | | DGSFFLYSKLTVDKSRWQQGNVFSCSVMHEALHNHYTQKSLSLSPG |
| TIGIT-30-49 | 1781 | MKHLWFFLLLVAAPRWVLSEVQLVESGGGLVQAGGSLRLSCAASGNIFSRYIMGW |
| | | FRQAPGKEREWVAGISNGGTTKYADSVKGRFTISADNAKNTVYLQMNSLKPEDTA |
| | | VYYCAQGWKIVPTNWGQGTQVTVSSGGGGSEPKSSDKTHTCPPCPAPELLGGPSVF |
| | | LFPPKPKDTLMISRTPEVTCVVVDVSHEDPEVKFNWYVDGVEVHNAKTKPREEQY |
| | | NSTYRVVSVLTVLHQDWLNGKEYKCKVSNKALPAPIEKTISKAKGQPREPQVYTLP |
| | | PSREEMTKNQVSLTCLVKGFYPSDIAVEWESNGQPENNYKTTPPVLDSDGSFFLYSK |
| | | LTVDKSRWQQGNVFSCSVMHEALHNHYTQKSLSLSPG |
| TIGIT-30-50 | 1782 | MKHLWFFLLLVAAPRWVLSEVQLVESGGGLVQAGGSLRLSCAASGRSFSNYVMG |
| | | WFRQAPGKERERVATITSGGLTVYADSVKGRFTISADNAKNTVYLQMNSLKPEDTA |
| | | VYYCALYRVNWGQGTQVTVSSGGGGSEPKSSDKTHTCPPCPAPELLGGPSVFLFPP |
| | | KPKDTLMISRTPEVTCVVVDVSHEDPEVKFNWYVDGVEVHNAKTKPREEQYNSTY |
| | | RVVSVLTVLHQDWLNGKEYKCKVSNKALPAPIEKTISKAKGQPREPQVYTLPPSRE |
| | | EMTKNQVSLTCLVKGFYPSDIAVEWESNGQPENNYKTTPPVLDSDGSFFLYSKLTV |
| | | DKSRWQQGNVFSCSVMHEALHNHYTQKSLSLSPG |
| TIGIT-30-51 | 1783 | MKHLWFFLLLVAAPRWVLSEVQLVESGGGLVQAGGSLRLSCAASGSIFSISDMGWF |
| | | RQAPGKEREFVGAINWLSESTYYADSVKGRFTISADNAKNTVYLQMNSLKPEDTAV |
| | | YYCAAQGGVLSGWDWGQGTQVTVSSGGGGSEPKSSDKTHTCPPCPAPELLGGPSV |
| | | FLFPPKPKDTLMISRTPEVTCVVVDVSHEDPEVKFNWYVDGVEVHNAKTKPREEQY |
| | | NSTYRVVSVLTVLHQDWLNGKEYKCKVSNKALPAPIEKTISKAKGQPREPQVYTLP |
| | | PSREEMTKNQVSLTCLVKGFYPSDIAVEWESNGQPENNYKTTPPVLDSDGSFFLYSK |
| | | LTVDKSRWQQGNVFSCSVMHEALHNHYTQKSLSLSPG |
| TIGIT-30-52 | 1784 | MKHLWFFLLLVAAPRWVLSEVQLVESGGGLVQAGGSLRLSCAASGRTFSNYFMG |
| | | WFRQAPGKERESVATVTWRDNITYYADSVKGRFTISADNAKNTVYLQMNSLKPED |
| | | TAVYYCASAGRWGQGTQVTVSSGGGGSEPKSSDKTHTCPPCPAPELLGGPSVFLFP |
| | | PKPKDTLMISRTPEVTCVVVDVSHEDPEVKFNWYVDGVEVHNAKTKPREEQYNST |
| | | YRVVSVLTVLHQDWLNGKEYKCKVSNKALPAPIEKTISKAKGQPREPQVYTLPPSR |
| | | EEMTKNQVSLTCLVKGFYPSDIAVEWESNGQPENNYKTTPPVLDSDGSFFLYSKLT |
| | | VDKSRWQQGNVFSCSVMHEALHNHYTQKSLSLSPG |
| TIGIT-30-53 | 1785 | MKHLWFFLLLVAAPRWVLSEVQLVESGGGLVQAGGSLRLSCAASGLTFSNYVMG |
| | | WFRQAPGKERESVAAINWDSARTYYADSVKGRFTISADNAKNTVYLQMNSLKPED |
| | | TAVYYCASAGRWGQGTQVTVSSGGGGSEPKSSDKTHTCPPCPAPELLGGPSVFLFP |
| | | PKPKDTLMISRTPEVTCVVVDVSHEDPEVKFNWYVDGVEVHNAKTKPREEQYNST |
| | | YRVVSVLTVLHQDWLNGKEYKCKVSNKALPAPIEKTISKAKGQPREPQVYTLPPSR |
| | | EEMTKNQVSLTCLVKGFYPSDIAVEWESNGQPENNYKTTPPVLDSDGSFFLYSKLT |
| | | VDKSRWQQGNVFSCSVMHEALHNHYTQKSLSLSPG |
| TIGIT-30-54 | 1786 | MKHLWFFLLLVAAPRWVLSEVQLVESGGGLVQAGGSLRLSCAASGFTFRSFGMGW |
| | | FRQAPGKEREFVASTIWSRGDTYYADSVKGRFTISADNAKNTVYLQMNSLKPEDTA |
| | | VYYCASSPYGPLYRSTHYYDWGQGTQVTVSSGGGGSEPKSSDKTHTCPPCPAPELL |
| | | GGPSVFLFPPKPKDTLMISRTPEVTCVVVDVSHEDPEVKFNWYVDGVEVHNAKTKP |
| | | REEQYNSTYRVVSVLTVLHQDWLNGKEYKCKVSNKALPAPIEKTISKAKGQPREPQ |
| | | VYTLPPSREEMTKNQVSLTCLVKGFYPSDIAVEWESNGQPENNYKTTPPVLDSDGSF |
| | | FLYSKLTVDKSRWQQGNVFSCSVMHEALHNHYTQKSLSLSPG |
| TIGIT-30-55 | 1787 | MKHLWFFLLLVAAPRWVLSEVQLVESGGGLVQAGGSLRLSCAASGNTFSGGFMG |
| | | WFRQAPGKEREWVASVLRGGYTWYADSVKGRFTISADNAKNTVYLQMNSLKPED |
| | | TAVYYCATGWQSTTKSQGWGQGTQVTVSSGGGGSEPKSSDKTHTCPPCPAPELLG |
| | | GPSVFLFPPKPKDTLMISRTPEVTCVVVDVSHEDPEVKFNWYVDGVEVHNAKTKPR |
| | | EEQYNSTYRVVSVLTVLHQDWLNGKEYKCKVSNKALPAPIEKTISKAKGQPREPQV |
| | | YTLPPSREEMTKNQVSLTCLVKGFYPSDIAVEWESNGQPENNYKTTPPVLDSDGSFF |
| | | LYSKLTVDKSRWQQGNVFSCSVMHEALHNHYTQKSLSLSPG |
| TIGIT-30-56 | 1788 | MKHLWFFLLLVAAPRWVLSEVQLVESGGGLVQAGGSLRLSCAASGLTISTYPMGW |
| | | FRQAPGKEREFVAAVNWSGRRELYADSVKGRFTISADNAKNTVYLQMNSLKPEDT |
| | | AVYYCAAFREYHWGQGTQVTVSSGGGGSEPKSSDKTHTCPPCPAPELLGGPSVFLF |
| | | PPKPKDTLMISRTPEVTCVVVDVSHEDPEVKFNWYVDGVEVHNAKTKPREEQYNS |
| | | TYRVVSVLTVLHQDWLNGKEYKCKVSNKALPAPIEKTISKAKGQPREPQVYTLPPS |
| | | REEMTKNQVSLTCLVKGFYPSDIAVEWESNGQPENNYKTTPPVLDSDGSFFLYSKL |
| | | TVDKSRWQQGNVFSCSVMHEALHNHYTQKSLSLSPG |
| TIGIT-30-57 | 1789 | MKHLWFFLLLVAAPRWVLSEVQLVESGGGLVQAGGSLRLSCAASGPTFSIYDMGW |
| | | FRQAPGKEREFVAAITWNSGRIGYADSVKGRFTISADNAKNTVYLQMNSLKPEDTA |
| | | VYYCAAGVWSSLRHTAANWGQGTQVTVSSGGGGSEPKSSDKTHTCPPCPAPELLG |
| | | GPSVFLFPPKPKDTLMISRTPEVTCVVVDVSHEDPEVKFNWYVDGVEVHNAKTKPR |
| | | EEQYNSTYRVVSVLTVLHQDWLNGKEYKCKVSNKALPAPIEKTISKAKGQPREPQV |
| | | YTLPPSREEMTKNQVSLTCLVKGFYPSDIAVEWESNGQPENNYKTTPPVLDSDGSFF |
| | | LYSKLTVDKSRWQQGNVFSCSVMHEALHNHYTQKSLSLSPG |
| TIGIT-30-58 | 1790 | MKHLWFFLLLVAAPRWVLSEVQLVESGGGLVQAGGSLRLSCAASGFAFGDSWMG |
| | | WFRQAPGKEREWVSGISSGGGRTYYADSVKGRFTISADNAKNTVYLQMNSLKPED |
| | | TAVYYCAADVWYGSTWRNWGQGTQVTVSSGGGGSEPKSSDKTHTCPPCPAPELL |
| | | GGPSVFLFPPKPKDTLMISRTPEVTCVVVDVSHEDPEVKFNWYVDGVEVHNAKTKP |
| | | REEQYNSTYRVVSVLTVLHQDWLNGKEYKCKVSNKALPAPIEKTISKAKGQPREPQ |
| | | VYTLPPSREEMTKNQVSLTCLVKGFYPSDIAVEWESNGQPENNYKTTPPVLDSDGSF |
| | | FLYSKLTVDKSRWQQGNVFSCSVMHEALHNHYTQKSLSLSPG |
| TIGIT-31-01 | 1791 | MKHLWFFLLLVAAPRWVLSEVQLVESGGGLVQPGGSLRLSCAASGFTFDRSWMG |
| | | WFRQAPGKEREVVASITSGGSTYYADSVKGRFTISADNSKNTAYLQMNSLKPEDTA |
| | | VYYCAADVWYGSTWRNWGQGTLVTVSSGGGGSEPKSSDKTHTCPPCPAPELLGGP |
| | | SVFLFPPKPKDTLMISRTPEVTCVVVDVSHEDPEVKFNWYVDGVEVHNAKTKPREE |
| | | QYNSTYRVVSVLTVLHQDWLNGKEYKCKVSNKALPAPIEKTISKAKGQPREPQVYT |
| | | LPPSREEMTKNQVSLTCLVKGFYPSDIAVEWESNGQPENNYKTTPPVLDSDGSFFLY |
| | | SKLTVDKSRWQQGNVFSCSVMHEALHNHYTQKSLSLSPG |
| TIGIT-31-02 | 1792 | MKHLWFFLLLVAAPRWVLSEVQLVESGGGLVQPGGSLRLSCAASGRTFGDYIMGW |
| | | FRQAPGKERELVAEITRSGRTNYADSVKGRFTISADNSKNTAYLQMNSLKPEDTAV |
| | | YYCAAVFSRGPLTWGQGTLVTVSSGGGGSEPKSSDKTHTCPPCPAPELLGGPSVFLF |
| | | PPKPKDTLMISRTPEVTCVVVDVSHEDPEVKFNWYVDGVEVHNAKTKPREEQYNS |
| | | TYRVVSVLTVLHQDWLNGKEYKCKVSNKALPAPIEKTISKAKGQPREPQVYTLPPS |
| | | REEMTKNQVSLTCLVKGFYPSDIAVEWESNGQPENNYKTTPPVLDSDGSFFLYSKL |
| | | TVDKSRWQQGNVFSCSVMHEALHNHYTQKSLSLSPG |
| TIGIT-31-03 | 1793 | MKHLWFFLLLVAAPRWVLSEVQLVESGGGLVQPGGSLRLSCAASGFTFSGNWMG |
| | | WFRQAPGKEREFVASISSSGISTYYADSVKGRFTISADNSKNTAYLQMNSLKPEDTA |
| | | VYYCAADVWYGSTWRNWGQGTLVTVSSGGGGSEPKSSDKTHTCPPCPAPELLGGP |
| | | SVFLFPPKPKDTLMISRTPEVTCVVVDVSHEDPEVKFNWYVDGVEVHNAKTKPREE |
| | | QYNSTYRVVSVLTVLHQDWLNGKEYKCKVSNKALPAPIEKTISKAKGQPREPQVYT |
| | | LPPSREEMTKNQVSLTCLVKGFYPSDIAVEWESNGQPENNYKTTPPVLDSDGSFFLY |
| | | SKLTVDKSRWQQGNVFSCSVMHEALHNHYTQKSLSLSPG |
| TIGIT-31-04 | 1794 | MKHLWFFLLLVAAPRWVLSEVQLVESGGGLVQPGGSLRLSCAASGFPVNRYWMG |
| | | WFRQAPGKERELVATITSGGSTNYADSVKGRFTISADNSKNTAYLQMNSLKPEDTA |
| | | VYYCAADVWYGSTWRNWGQGTLVTVSSGGGGSEPKSSDKTHTCPPCPAPELLGGP |
| | | SVFLFPPKPKDTLMISRTPEVTCVVVDVSHEDPEVKFNWYVDGVEVHNAKTKPREE |
| | | QYNSTYRVVSVLTVLHQDWLNGKEYKCKVSNKALPAPIEKTISKAKGQPREPQVYT |
| | | LPPSREEMTKNQVSLTCLVKGFYPSDIAVEWESNGQPENNYKTTPPVLDSDGSFFLY |
| | | SKLTVDKSRWQQGNVFSCSVMHEALHNHYTQKSLSLSPG |
| TIGIT-31-05 | 1795 | MKHLWFFLLLVAAPRWVLSEVQLVESGGGLVQPGGSLRLSCAASGRTFGDYIMGW |
| | | FRQAPGKEREFVATISRGGGSTYVDSVKGRFTISADNSKNTAYLQMNSLKPEDTAV |
| | | YYCAAVFSRGPLTWGQGTLVTVSSGGGGSEPKSSDKTHTCPPCPAPELLGGPSVFLF |
| | | PPKPKDTLMISRTPEVTCVVVDVSHEDPEVKFNWYVDGVEVHNAKTKPREEQYNS |
| | | TYRVVSVLTVLHQDWLNGKEYKCKVSNKALPAPIEKTISKAKGQPREPQVYTLPPS |
| | | REEMTKNQVSLTCLVKGFYPSDIAVEWESNGQPENNYKTTPPVLDSDGSFFLYSKL |
| | | TVDKSRWQQGNVFSCSVMHEALHNHYTQKSLSLSPG |
| TIGIT-31-06 | 1796 | MKHLWFFLLLVAAPRWVLSEVQLVESGGGLVQPGGSLRLSCAASGFTFSTSWMGW |
| | | FRQAPGKERELVASITSGGSTYYADSVKGRFTISADNSKNTAYLQMNSLKPEDTAV |
| | | YYCAADVWYGSTWRNWGQGTLVTVSSGGGGSEPKSSDKTHTCPPCPAPELLGGPS |
| | | VFLFPPKPKDTLMISRTPEVTCVVVDVSHEDPEVKFNWYVDGVEVHNAKTKPREEQ |
| | | YNSTYRVVSVLTVLHQDWLNGKEYKCKVSNKALPAPIEKTISKAKGQPREPQVYTL |
| | | PPSREEMTKNQVSLTCLVKGFYPSDIAVEWESNGQPENNYKTTPPVLDSDGSFFLYS |
| | | KLTVDKSRWQQGNVFSCSVMHEALHNHYTQKSLSLSPG |
| TIGIT-31-7 | 1797 | MKHLWFFLLLVAAPRWVLSEVQLVESGGGLVQPGGSLRLSCAASGSTFSINRMGW |
| | | FRQAPGKEREWVATIVHSGGHSGGTSYYADSVKGRFTISADNSKNTAYLQMNSLKP |
| | | EDTAVYYCAARPYTRPGSMWVSSLYDWGQGTLVTVSSGGGGSEPKSSDKTHTCPP |
| | | CPAPELLGGPSVFLFPPKPKDTLMISRTPEVTCVVVDVSHEDPEVKFNWYVDGVEV |
| | | HNAKTKPREEQYNSTYRVVSVLTVLHQDWLNGKEYKCKVSNKALPAPIEKTISKA |
| | | KGQPREPQVYTLPPSREEMTKNQVSLTCLVKGFYPSDIAVEWESNGQPENNYKTTP |
| | | PVLDSDGSFFLYSKLTVDKSRWQQGNVFSCSVMHEALHNHYTQKSLSLSPG |
| TIGIT-31-08 | 1798 | MKHLWFFLLLVAAPRWVLSEVQLVESGGGLVQPGGSLRLSCAASGFTFSTSWMGW |
| | | FRQAPGKERELVAARNSGGNTNYADSVKGRFTISADNSKNTAYLQMNSLKPEDTA |
| | | VYYCAADVWYGSTWRNWGQGTLVTVSSGGGGSEPKSSDKTHTCPPCPAPELLGGP |
| | | SVFLFPPKPKDTLMISRTPEVTCVVVDVSHEDPEVKFNWYVDGVEVHNAKTKPREE |
| | | QYNSTYRVVSVLTVLHQDWLNGKEYKCKVSNKALPAPIEKTISKAKGQPREPQVYT |
| | | LPPSREEMTKNQVSLTCLVKGFYPSDIAVEWESNGQPENNYKTTPPVLDSDGSFFLY |
| | | SKLTVDKSRWQQGNVFSCSVMHEALHNHYTQKSLSLSPG |
| TIGIT-31-9 | 1799 | MKHLWFFLLLVAAPRWVLSEVQLVESGGGLVQPGGSLRLSCAASGGTLSGNAMG |
| | | WFRQAPGKEREWVASIYWSSGNTYYADSVKGRFTISADNSKNTAYLQMNSLKPED |
| | | TAVYYCANSNKPKFDWGQGTLVTVSSGGGGSEPKSSDKTHTCPPCPAPELLGGPSV |
| | | FLFPPKPKDTLMISRTPEVTCVVVDVSHEDPEVKFNWYVDGVEVHNAKTKPREEQY |
| | | NSTYRVVSVLTVLHQDWLNGKEYKCKVSNKALPAPIEKTISKAKGQPREPQVYTLP |
| | | PSREEMTKNQVSLTCLVKGFYPSDIAVEWESNGQPENNYKTTPPVLDSDGSFFLYSK |
| | | LTVDKSRWQQGNVFSCSVMHEALHNHYTQKSLSLSPG |
| TIGIT-31-10 | 1800 | MKHLWFFLLLVAAPRWVLSEVQLVESGGGLVQPGGSLRLSCAASGHTFSSYGMG |
| | | WFRQAPGKERELVAAISWSGISTIYADSVKGRFTISADNSKNTAYLQMNSLKPEDTA |
| | | VYYCASSPYGPLYRSTHYYDWGQGTLVTVSSGGGGSEPKSSDKTHTCPPCPAPELL |
| | | GGPSVFLFPPKPKDTLMISRTPEVTCVVVDVSHEDPEVKFNWYVDGVEVHNAKTKP |
| | | REEQYNSTYRVVSVLTVLHQDWLNGKEYKCKVSNKALPAPIEKTISKAKGQPREPQ |
| | | VYTLPPSREEMTKNQVSLTCLVKGFYPSDIAVEWESNGQPENNYKTTPPVLDSDGSF |
| | | FLYSKLTVDKSRWQQGNVFSCSVMHEALHNHYTQKSLSLSPG |
| TIGIT-31-11 | 1801 | MKHLWFFLLLVAAPRWVLSEVQLVESGGGLVQPGGSLRLSCAASGFTFSTSWMGW |
| | | FRQAPGKEREFVASISTSGNTFYADSVKGRFTISADNSKNTAYLQMNSLKPEDTAVY |
| | | YCAADVWYGSTWRNWGQGTLVTVSSGGGGSEPKSSDKTHTCPPCPAPELLGGPSV |
| | | FLFPPKPKDTLMISRTPEVTCVVVDVSHEDPEVKFNWYVDGVEVHNAKTKPREEQY |
| | | NSTYRVVSVLTVLHQDWLNGKEYKCKVSNKALPAPIEKTISKAKGQPREPQVYTLP |
| | | PSREEMTKNQVSLTCLVKGFYPSDIAVEWESNGQPENNYKTTPPVLDSDGSFFLYSK |
| | | LTVDKSRWQQGNVFSCSVMHEALHNHYTQKSLSLSPG |
| TIGIT-31-12 | 1802 | MKHLWFFLLLVAAPRWVLSEVQLVESGGGLVQPGGSLRLSCAASGFTFSRYWMG |
| | | WFRQAPGKEREAVASITSGGSTYYADSVKGRFTISADNSKNTAYLQMNSLKPEDTA |
| | | VYYCAADVWYGSTWRNWGQGTLVTVSSGGGGSEPKSSDKTHTCPPCPAPELLGGP |
| | | SVFLFPPKPKDTLMISRTPEVTCVVVDVSHEDPEVKFNWYVDGVEVHNAKTKPREE |
| | | QYNSTYRVVSVLTVLHQDWLNGKEYKCKVSNKALPAPIEKTISKAKGQPREPQVYT |
| | | LPPSREEMTKNQVSLTCLVKGFYPSDIAVEWESNGQPENNYKTTPPVLDSDGSFFLY |
| | | SKLTVDKSRWQQGNVFSCSVMHEALHNHYTQKSLSLSPG |
| TIGIT-31-13 | 1803 | MKHLWFFLLLVAAPRWVLSEVQLVESGGGLVQPGGSLRLSCAASGFTFDRSWMG |
| | | WFRQAPGKEREWVASITSGGTTNYADSVKGRFTISADNSKNTAYLQMNSLKPEDT |
| | | AVYYCAADVWYGSTWRNWGQGTLVTVSSGGGGSEPKSSDKTHTCPPCPAPELLG |
| | | GPSVFLFPPKPKDTLMISRTPEVTCVVVDVSHEDPEVKFNWYVDGVEVHNAKTKPR |
| | | EEQYNSTYRVVSVLTVLHQDWLNGKEYKCKVSNKALPAPIEKTISKAKGQPREPQV |
| | | YTLPPSREEMTKNQVSLTCLVKGFYPSDIAVEWESNGQPENNYKTTPPVLDSDGSFF |
| | | LYSKLTVDKSRWQQGNVFSCSVMHEALHNHYTQKSLSLSPG |
| TIGIT-31-14 | 1804 | MKHLWFFLLLVAAPRWVLSEVQLVESGGGLVQPGGSLRLSCAASGYTFRAYVMG |
| | | WFRQAPGKERELVAVINYRGSSLKYADSVKGRFTISADNSKNTAYLQMNSLKPEDT |
| | | AVYYCAASEWGGSDYDHDYDWGQGTLVTVSSGGGGSEPKSSDKTHTCPPCPAPEL |
| | | LGGPSVFLFPPKPKDTLMISRTPEVTCVVVDVSHEDPEVKFNWYVDGVEVHNAKTK |
| | | PREEQYNSTYRVVSVLTVLHQDWLNGKEYKCKVSNKALPAPIEKTISKAKGQPREP |
| | | QVYTLPPSREEMTKNQVSLTCLVKGFYPSDIAVEWESNGQPENNYKTTPPVLDSDG |
| | | SFFLYSKLTVDKSRWQQGNVFSCSVMHEALHNHYTQKSLSLSPG |
| TIGIT-31-15 | 1805 | MKHLWFFLLLVAAPRWVLSEVQLVESGGGLVQPGGSLRLSCAASGFTFSTYGMGW |
| | | FRQAPGKEREFVAAISWSGVSKHYADSVKGRFTISADNSKNTAYLQMNSLKPEDTA |
| | | VYYCASSPYGPLYRSTHYYDWGQGTLVTVSSGGGGSEPKSSDKTHTCPPCPAPELL |
| | | GGPSVFLFPPKPKDTLMISRTPEVTCVVVDVSHEDPEVKFNWYVDGVEVHNAKTKP |
| | | REEQYNSTYRVVSVLTVLHQDWLNGKEYKCKVSNKALPAPIEKTISKAKGQPREPQ |
| | | VYTLPPSREEMTKNQVSLTCLVKGFYPSDIAVEWESNGQPENNYKTTPPVLDSDGSF |
| | | FLYSKLTVDKSRWQQGNVFSCSVMHEALHNHYTQKSLSLSPG |
| TIGIT-31-16 | 1806 | MKHLWFFLLLVAAPRWVLSEVQLVESGGGLVQPGGSLRLSCAASGFTFSTSWMGW |
| | | FRQAPGKERELVVSVTSGGYTNYADSVKGRFTISADNSKNTAYLQMNSLKPEDTAV |
| | | YYCAADVWYGSTWRNWGQGTLVTVSSGGGGSEPKSSDKTHTCPPCPAPELLGGPS |
| | | VFLFPPKPKDTLMISRTPEVTCVVVDVSHEDPEVKFNWYVDGVEVHNAKTKPREEQ |
| | | YNSTYRVVSVLTVLHQDWLNGKEYKCKVSNKALPAPIEKTISKAKGQPREPQVYTL |
| | | PPSREEMTKNQVSLTCLVKGFYPSDIAVEWESNGQPENNYKTTPPVLDSDGSFFLYS |
| | | KLTVDKSRWQQGNVFSCSVMHEALHNHYTQKSLSLSPG |
| TIGIT-31-17 | 1807 | MKHLWFFLLLVAAPRWVLSEVQLVESGGGLVQPGGSLRLSCAASGFTMSSSWMG |
| | | WFRQAPGKEREWVASINSGGTRNYADSVKGRFTISADNSKNTAYLQMNSLKPEDT |
| | | AVYYCAADVWYGSTWRNWGQGTLVTVSSGGGGSEPKSSDKTHTCPPCPAPELLG |
| | | GPSVFLFPPKPKDTLMISRTPEVTCVVVDVSHEDPEVKFNWYVDGVEVHNAKTKPR |
| | | EEQYNSTYRVVSVLTVLHQDWLNGKEYKCKVSNKALPAPIEKTISKAKGQPREPQV |
| | | YTLPPSREEMTKNQVSLTCLVKGFYPSDIAVEWESNGQPENNYKTTPPVLDSDGSFF |
| | | LYSKLTVDKSRWQQGNVFSCSVMHEALHNHYTQKSLSLSPG |
| TIGIT-31-18 | 1808 | MKHLWFFLLLVAAPRWVLSEVQLVESGGGLVQPGGSLRLSCAASGFTFSGNWMG |
| | | WFRQAPGKEREFVASISSGSAINYADSVKGRFTISADNSKNTAYLQMNSLKPEDTA |
| | | VYYCAADVWYGSTWRNWGQGTLVTVSSGGGGSEPKSSDKTHTCPPCPAPELLGGP |
| | | SVFLFPPKPKDTLMISRTPEVTCVVVDVSHEDPEVKFNWYVDGVEVHNAKTKPREE |
| | | QYNSTYRVVSVLTVLHQDWLNGKEYKCKVSNKALPAPIEKTISKAKGQPREPQVYT |
| | | LPPSREEMTKNQVSLTCLVKGFYPSDIAVEWESNGQPENNYKTTPPVLDSDGSFFLY |
| | | SKLTVDKSRWQQGNVFSCSVMHEALHNHYTQKSLSLSPG |
| TIGIT-31-19 | 1809 | MKHLWFFLLLVAAPRWVLSEVQLVESGGGLVQPGGSLRLSCAASGRTFGNYAMG |
| | | WFRQAPGKEREFVADIRSSAGRTYYADSVKGRFTISADNSKNTAYLQMNSLKPEDT |
| | | AVYYCAASEWGGSDYDHDYDWGQGTLVTVSSGGGGSEPKSSDKTHTCPPCPAPEL |
| | | LGGPSVFLFPPKPKDTLMISRTPEVTCVVVDVSHEDPEVKFNWYVDGVEVHNAKTK |
| | | PREEQYNSTYRVVSVLTVLHQDWLNGKEYKCKVSNKALPAPIEKTISKAKGQPREP |
| | | QVYTLPPSREEMTKNQVSLTCLVKGFYPSDIAVEWESNGQPENNYKTTPPVLDSDG |
| | | SFFLYSKLTVDKSRWQQGNVFSCSVMHEALHNHYTQKSLSLSPG |
| TIGIT-31-20 | 1810 | MKHLWFFLLLVAAPRWVLSEVQLVESGGGLVQPGGSLRLSCAASGFTFSGNWMG |
| | | WFRQAPGKEREFVAGILSDGRELYADSVKGRFTISADNSKNTAYLQMNSLKPEDTA |
| | | VYYCAADVWYGSTWRNWGQGTLVTVSSGGGGSEPKSSDKTHTCPPCPAPELLGGP |
| | | SVFLFPPKPKDTLMISRTPEVTCVVVDVSHEDPEVKFNWYVDGVEVHNAKTKPREE |
| | | QYNSTYRVVSVLTVLHQDWLNGKEYKCKVSNKALPAPIEKTISKAKGQPREPQVYT |
| | | LPPSREEMTKNQVSLTCLVKGFYPSDIAVEWESNGQPENNYKTTPPVLDSDGSFFLY |
| | | SKLTVDKSRWQQGNVFSCSVMHEALHNHYTQKSLSLSPG |
| TIGIT-31-21 | 1811 | MKHLWFFLLLVAAPRWVLSEVQLVESGGGLVQPGGSLRLSCAASGFTLSGNWMG |
| | | WFRQAPGKEREFVASISSSGISTYYADSVKGRFIISADNSKNTAYLQMNSLKPEDTA |
| | | VYYCAADVWYGSTWRNWGQGTLVTVSSGGGGSEPKSSDKTHTCPPCPAPELLGGP |
| | | SVFLFPPKPKDTLMISRTPEVTCVVVDVSHEDPEVKFNWYVDGVEVHNAKTKPREE |
| | | QYNSTYRVVSVLTVLHQDWLNGKEYKCKVSNKALPAPIEKTISKAKGQPREPQVYT |
| | | LPPSREEMTKNQVSLTCLVKGFYPSDIAVEWESNGQPENNYKTTPPVLDSDGSFFLY |
| | | SKLTVDKSRWQQGNVFSCSVMHEALHNHYTQKSLSLSPG |
| TIGIT-31-22 | 1812 | MKHLWFFLLLVAAPRWVLSEVQLVESGGGLVQPGGSLRLSCAASGRTFSTHAMG |
| | | WFRQAPGKEREFVAAITPINWGGRGTHYADSVKGRFTISADNSKNTAYLQMNSLKP |
| | | EDNAVYYCAAKRLRSGRWTWGQGTLVTVSSGGGGSEPKSSDKTHTCPPCPAPELL |
| | | GGPSVFLFPPKPKDTLMISRTPEVTCVVVDVSHEDPEVKFNWYVDGVEVHNAKTKP |
| | | REEQYNSTYRVVSVLTVLHQDWLNGKEYKCKVSNKALPAPIEKTISKAKGQPREPQ |
| | | VYTLPPSREEMTKNQVSLTCLVKGFYPSDIAVEWESNGQPENNYKTTPPVLDSDGSF |
| | | FLYSKLTVDKSRWQQGNVFSCSVMHEALHNHYTQKSLSLSPG |
| TIGIT-31-23 | 1813 | MKHLWFFLLLVAAPRWVLSEVQLVESGGGLVQPGGSLRLSCAASGFTFSNSGMGW |
| | | FRQAPGKEREWVASIYWSSGNTYYADSVKGRFTISADNSKNTAYLQMNSLKPEDT |
| | | AVYYCANSNKPKFDWGQGTLVTVSSGGGGSEPKSSDKTHTCPPCPAPELLGGPSVF |
| | | LFPPKPKDTLMISRTPEVTCVVVDVSHEDPEVKFNWYVDGVEVHNAKTKPREEQY |
| | | NSTYRVVSVLTVLHQDWLNGKEYKCKVSNKALPAPIEKTISKAKGQPREPQVYTLP |
| | | PSREEMTKNQVSLTCLVKGFYPSDIAVEWESNGQPENNYKTTPPVLDSDGSFFLYSK |
| | | LTVDKSRWQQGNVFSCSVMHEALHNHYTQKSLSLSPG |
| TIGIT-31-24 | 1814 | MKHLWFFLLLVAAPRWVLSEVQLVESGGGLVQPGGSLRLSCAASGRTFSMGWFRQ |
| | | APGKEREFVATVRWGTSSTYYADSVKGRFTISADNSKNTAYLQMNSLKPEDTAVY |
| | | YCAAETFGSGSSLMSEYDWGQGTLVTVSSGGGGSEPKSSDKTHTCPPCPAPELLGG |
| | | PSVFLFPPKPKDTLMISRTPEVTCVVVDVSHEDPEVKFNWYVDGVEVHNAKTKPRE |
| | | EQYNSTYRVVSVLTVLHQDWLNGKEYKCKVSNKALPAPIEKTISKAKGQPREPQVY |
| | | TLPPSREEMTKNQVSLTCLVKGFYPSDIAVEWESNGQPENNYKTTPPVLDSDGSFFL |
| | | YSKLTVDKSRWQQGNVFSCSVMHEALHNHYTQKSLSLSPG |
| TIGIT-31-25 | 1815 | MKHLWFFLLLVAAPRWVLSEVQLVESGGGLVQPGGSLRLSCAASGNIFSRYIMGW |
| | | FRQAPGKEREWVAGISNGGTTKYADSVKGRFTISADNSKNTAYLQMNSLKPEDTA |
| | | VYYCAQGWKIVPTNWGQGTLVTVSSGGGGSEPKSSDKTHTCPPCPAPELLGGPSVF |
| | | LFPPKPKDTLMISRTPEVTCVVVDVSHEDPEVKFNWYVDGVEVHNAKTKPREEQY |
| | | NSTYRVVSVLTVLHQDWLNGKEYKCKVSNKALPAPIEKTISKAKGQPREPQVYTLP |
| | | PSREEMTKNQVSLTCLVKGFYPSDIAVEWESNGQPENNYKTTPPVLDSDGSFFLYSK |
| | | LTVDKSRWQQGNVFSCSVMHEALHNHYTQKSLSLSPG |
| TIGIT-31-26 | 1816 | MKHLWFFLLLVAAPRWVLSEVQLVESGGGLVQPGGSLRLSCAASGFTFDRSWMG |
| | | WFRQAPGKERELVAAITSGGSTYYADSVKGRFTISADNSKNTAYLQMNSLKPEDTA |
| | | VYYCAADVWYGSTWRNWGQGTLVTVSSGGGGSEPKSSDKTHTCPPCPAPELLGGP |
| | | SVFLFPPKPKDTLMISRTPEVTCVVVDVSHEDPEVKFNWYVDGVEVHNAKTKPREE |
| | | QYNSTYRVVSVLTVLHQDWLNGKEYKCKVSNKALPAPIEKTISKAKGQPREPQVYT |
| | | LPPSREEMTKNQVSLTCLVKGFYPSDIAVEWESNGQPENNYKTTPPVLDSDGSFFLY |
| | | SKLTVDKSRWQQGNVFSCSVMHEALHNHYTQKSLSLSPG |
| TIGIT-31-27 | 1817 | MKHLWFFLLLVAAPRWVLSEVQLVESGGGLVQPGGSLRLSCAASGFTFGHYAMG |
| | | WFRQAPGKEREFVAAISWSGVSTYYADSVKGRFTISADNSKNTAYLQMNSLKPEDT |
| | | AVYYCASSPYGPLYRSTHYYDWGQGTLVTVSSGGGGSEPKSSDKTHTCPPCPAPEL |
| | | LGGPSVFLFPPKPKDTLMISRTPEVTCVVVDVSHEDPEVKFNWYVDGVEVHNAKTK |
| | | PREEQYNSTYRVVSVLTVLHQDWLNGKEYKCKVSNKALPAPIEKTISKAKGQPREP |
| | | QVYTLPPSREEMTKNQVSLTCLVKGFYPSDIAVEWESNGQPENNYKTTPPVLDSDG |
| | | SFFLYSKLTVDKSRWQQGNVFSCSVMHEALHNHYTQKSLSLSPG |
| TIGIT-31-28 | 1818 | MKHLWFFLLLVAAPRWVLSEVQLVESGGGLVQPGGSLRLSCAASGRTFSSYHMGW |
| | | FRQAPGKERELVALISRVGVTSYADSVKGRFTISADNSKNTAYLQMNSLKPEDTAV |
| | | YYCAAVRTYGSATYDWGQGTLVTVSSGGGGSEPKSSDKTHTCPPCPAPELLGGPSV |
| | | FLFPPKPKDTLMISRTPEVTCVVVDVSHEDPEVKFNWYVDGVEVHNAKTKPREEQY |
| | | NSTYRVVSVLTVLHQDWLNGKEYKCKVSNKALPAPIEKTISKAKGQPREPQVYTLP |
| | | PSREEMTKNQVSLTCLVKGFYPSDIAVEWESNGQPENNYKTTPPVLDSDGSFFLYSK |
| | | LTVDKSRWQQGNVFSCSVMHEALHNHYTQKSLSLSPG |
| TIGIT-31-29 | 1819 | MKHLWFFLLLVAAPRWVLSEVQLVESGGGLVQPGGSLRLSCAASGRSRMGWFRQ |
| | | APGKEREFVATISWSGSAVYADSVKGRFTISADNSKNTAYLQMNSLKPEDTAVYYC |
| | | AAGGRYSARVWGQGTLVTVSSGGGGSEPKSSDKTHTCPPCPAPELLGGPSVFLFPP |
| | | KPKDTLMISRTPEVTCVVVDVSHEDPEVKFNWYVDGVEVHNAKTKPREEQYNSTY |
| | | RVVSVLTVLHQDWLNGKEYKCKVSNKALPAPIEKTISKAKGQPREPQVYTLPPSRE |
| | | EMTKNQVSLTCLVKGFYPSDIAVEWESNGQPENNYKTTPPVLDSDGSFFLYSKLTV |
| | | DKSRWQQGNVFSCSVMHEALHNHYTQKSLSLSPG |
| TIGIT-31-30 | 1820 | MKHLWFFLLLVAAPRWVLSEVQLVESGGGLVQPGGSLRLSCAASGRTYNMGWFR |
| | | QAPGKEREWVATIYSRSGGSTTYYADSVKGRFTISADNSKNTAYLQMNSLKPEDTA |
| | | VYYCATYGYDSGRYYSWGQGTLVTVSSGGGGSEPKSSDKTHTCPPCPAPELLGGPS |
| | | VFLFPPKPKDTLMISRTPEVTCVVVDVSHEDPEVKFNWYVDGVEVHNAKTKPREEQ |
| | | YNSTYRVVSVLTVLHQDWLNGKEYKCKVSNKALPAPIEKTISKAKGQPREPQVYTL |
| | | PPSREEMTKNQVSLTCLVKGFYPSDIAVEWESNGQPENNYKTTPPVLDSDGSFFLYS |
| | | KLTVDKSRWQQGNVFSCSVMHEALHNHYTQKSLSLSPG |
| TIGIT-31-31 | 1821 | MKHLWFFLLLVAAPRWVLSEVQLVESGGGLVQPGGSLRLSCAASGFTLSGNWMG |
| | | WFRQAPGKEREFVASISSGGGTNYADSVKGRFTISADNSKNTAYLQMNSLKPEDTA |
| | | VYYCAADVWYGSTWRNWGQGTLVTVSSGGGGSEPKSSDKTHTCPPCPAPELLGGP |
| | | SVFLFPPKPKDTLMISRTPEVTCVVVDVSHEDPEVKFNWYVDGVEVHNAKTKPREE |
| | | QYNSTYRVVSVLTVLHQDWLNGKEYKCKVSNKALPAPIEKTISKAKGQPREPQVYT |
| | | LPPSREEMTKNQVSLTCLVKGFYPSDIAVEWESNGQPENNYKTTPPVLDSDGSFFLY |
| | | SKLTVDKSRWQQGNVFSCSVMHEALHNHYTQKSLSLSPG |
| TIGIT-31-32 | 1822 | MKHLWFFLLLVAAPRWVLSEVQLVESGGGLVQPGGSLRLSCAASGFTFSTSWMGW |
| | | FRQAPGKERELVAAMTSGGGTNYADSVKGRFTISADNSKNTAYLQMNSLKPEDTA |
| | | VYYCAADVWYGSTWRNWGQGTLVTVSSGGGGSEPKSSDKTHTCPPCPAPELLGGP |
| | | SVFLFPPKPKDTLMISRTPEVTCVVVDVSHEDPEVKFNWYVDGVEVHNAKTKPREE |
| | | QYNSTYRVVSVLTVLHQDWLNGKEYKCKVSNKALPAPIEKTISKAKGQPREPQVYT |
| | | LPPSREEMTKNQVSLTCLVKGFYPSDIAVEWESNGQPENNYKTTPPVLDSDGSFFLY |
| | | SKLTVDKSRWQQGNVFSCSVMHEALHNHYTQKSLSLSPG |
| TIGIT-31-33 | 1823 | MKHLWFFLLLVAAPRWVLSEVQLVESGGGLVQPGGSLRLSCAASGFTFSTSWMGW |
| | | FRQAPGKERELVASITSGGSTNYADSVKGRFTISADNSKNTAYLQMNSLKPEDTAV |
| | | YYCAADVWYGSTWRNWGQGTLVTVSSGGGGSEPKSSDKTHTCPPCPAPELLGGPS |
| | | VFLFPPKPKDTLMISRTPEVTCVVVDVSHEDPEVKFNWYVDGVEVHNAKTKPREEQ |
| | | YNSTYRVVSVLTVLHQDWLNGKEYKCKVSNKALPAPIEKTISKAKGQPREPQVYTL |
| | | PPSREEMTKNQVSLTCLVKGFYPSDIAVEWESNGQPENNYKTTPPVLDSDGSFFLYS |
| | | KLTVDKSRWQQGNVFSCSVMHEALHNHYTQKSLSLSPG |
| TIGIT-31-34 | 1824 | MKHLWFFLLLVAAPRWVLSEVQLVESGGGLVQPGGSLRLSCAASGRSRYGMGWF |
| | | RQAPGKEREFVSAISWSGISTYYADSVKGRFTISADNSKNTAYLQMNSLKPEDTAV |
| | | YYCAATQWGSSGWKQARWYDWGQGTLVTVSSGGGGSEPKSSDKTHTCPPCPAPE |
| | | LLGGPSVFLFPPKPKDTLMISRTPEVTCVVVDVSHEDPEVKFNWYVDGVEVHNAKT |
| | | KPREEQYNSTYRVVSVLTVLHQDWLNGKEYKCKVSNKALPAPIEKTISKAKGQPRE |
| | | PQVYTLPPSREEMTKNQVSLTCLVKGFYPSDIAVEWESNGQPENNYKTTPPVLDSD |
| | | GSFFLYSKLTVDKSRWQQGNVFSCSVMHEALHNHYTQKSLSLSPG |
| TIGIT-31-35 | 1825 | MKHLWFFLLLVAAPRWVLSEVQLVESGGGLVQPGGSLRLSCAASGFTFSTSWMGW |
| | | FRQAPGKERELVASITSGGTTNYADSVKGRFTISADNSKNTAYLQMNSLKPEDTAV |
| | | YYCAADVWYGSTWRNWGQGTLVTVSSGGGGSEPKSSDKTHTCPPCPAPELLGGPS |
| | | VFLFPPKPKDTLMISRTPEVTCVVVDVSHEDPEVKFNWYVDGVEVHNAKTKPREEQ |
| | | YNSTYRVVSVLTVLHQDWLNGKEYKCKVSNKALPAPIEKTISKAKGQPREPQVYTL |
| | | PPSREEMTKNQVSLTCLVKGFYPSDIAVEWESNGQPENNYKTTPPVLDSDGSFFLYS |
| | | KLTVDKSRWQQGNVFSCSVMHEALHNHYTQKSLSLSPG |
| TIGIT-31-36 | 1826 | MKHLWFFLLLVAAPRWVLSEVQLVESGGGLVQPGGSLRLSCAASGFTFDRSWMG |
| | | WFRQAPGKERELVASVTSGGTTNYADSVKGRFTISADNSKNTAYLQMNSLKPEDT |
| | | AVYYCAADVWYGSTWRNWGQGTLVTVSSGGGGSEPKSSDKTHTCPPCPAPELLG |
| | | GPSVFLFPPKPKDTLMISRTPEVTCVVVDVSHEDPEVKFNWYVDGVEVHNAKTKPR |
| | | EEQYNSTYRVVSVLTVLHQDWLNGKEYKCKVSNKALPAPIEKTISKAKGQPREPQV |
| | | YTLPPSREEMTKNQVSLTCLVKGFYPSDIAVEWESNGQPENNYKTTPPVLDSDGSFF |
| | | LYSKLTVDKSRWQQGNVFSCSVMHEALHNHYTQKSLSLSPG |
| TIGIT-31-37 | 1827 | MKHLWFFLLLVAAPRWVLSEVQLVESGGGLVQPGGSLRLSCAASGSIFSINSMGWF |
| | | RQAPGKEREFVAALSWIIGSTYYADSVKGRFTISADNSKNTAYLQMNSLKPEDTAV |
| | | YYCAVNGRWRSWSSQRDWGQGTLVTVSSGGGGSEPKSSDKTHTCPPCPAPELLGG |
| | | PSVFLFPPKPKDTLMISRTPEVTCVVVDVSHEDPEVKFNWYVDGVEVHNAKTKPRE |
| | | EQYNSTYRVVSVLTVLHQDWLNGKEYKCKVSNKALPAPIEKTISKAKGQPREPQVY |
| | | TLPPSREEMTKNQVSLTCLVKGFYPSDIAVEWESNGQPENNYKTTPPVLDSDGSFFL |
| | | YSKLTVDKSRWQQGNVFSCSVMHEALHNHYTQKSLSLSPG |
| TIGIT-31-38 | 1828 | MKHLWFFLLLVAAPRWVLSEVQLVESGGGLVQPGGSLRLSCAASGFTFDRSWMG |
| | | WFRQAPGKERELVASITSGGSTSYADSVKGRFTISADNSKNTAYLQMNSLKPEDTA |
| | | VYYCAADVWYGSTWRNWGQGTLVTVSSGGGGSEPKSSDKTHTCPPCPAPELLGGP |
| | | SVFLFPPKPKDTLMISRTPEVTCVVVDVSHEDPEVKFNWYVDGVEVHNAKTKPREE |
| | | QYNSTYRVVSVLTVLHQDWLNGKEYKCKVSNKALPAPIEKTISKAKGQPREPQVYT |
| | | LPPSREEMTKNQVSLTCLVKGFYPSDIAVEWESNGQPENNYKTTPPVLDSDGSFFLY |
| | | SKLTVDKSRWQQGNVFSCSVMHEALHNHYTQKSLSLSPG |
| TIGIT-31-39 | 1829 | MKHLWFFLLLVAAPRWVLSEVQLVESGGGLVQPGGSLRLSCAASGFTFSTSWMGW |
| | | FRQAPGKERELVAGVNSNGYINYADSVKGRFTISADNSKNTAYLQMNSLKPEDTAV |
| | | YYCAADVWYGSTWRNWGQGTLVTVSSGGGGSEPKSSDKTHTCPPCPAPELLGGPS |
| | | VFLFPPKPKDTLMISRTPEVTCVVVDVSHEDPEVKFNWYVDGVEVHNAKTKPREEQ |
| | | YNSTYRVVSVLTVLHQDWLNGKEYKCKVSNKALPAPIEKTISKAKGQPREPQVYTL |
| | | PPSREEMTKNQVSLTCLVKGFYPSDIAVEWESNGQPENNYKTTPPVLDSDGSFFLYS |
| | | KLTVDKSRWQQGNVFSCSVMHEALHNHYTQKSLSLSPG |
| TIGIT-31-40 | 1830 | MKHLWFFLLLVAAPRWVLSEVQLVESGGGLVQPGGSLRLSCAASGSTLRDYVMG |
| | | WFRQAPGKERELVSSISRSGTTMFADSVKGRFTIIADNSKNTAYLLMNSLKPQDTAV |
| | | YYCAAVFSRGLLTCGQGTLVTVSSGGGGSEPKSSDKTHTCPPCPAPELLGGPSVFLF |
| | | PPKPKDTLMISRTPEVTCVVVDVSHEDPEVKFNWYVDGVEVHNAKTKPREEQYNS |
| | | TYRVVSVLTVLHQDWLNGKEYKCKVSNKALPAPIEKTISKAKGQPREPQVYTLPPS |
| | | REEMTKNQVSLTCLVKGFYPSDIAVEWESNGQPENNYKTTPPVLDSDGSFFLYSKL |
| | | TVDKSRWQQGNVFSCSVMHEALHNHYTQKSLSLSPG |
| TIGIT-31-41 | 1831 | MKHLWFFLLLVAAPRWVLSEVQLVESGGGLVQPGGSLRLSCAASGGTLSSYIMGW |
| | | FRQAPGKEREFVAAISGWSGGTTNYADSVKGRFTISADNSKNTAYLQMNSLKPEDT |
| | | AVYYCAAARFAPGSRGYDWGQGTLVTVSSGGGGSEPKSSDKTHTCPPCPAPELLG |
| | | GPSVFLFPPKPKDTLMISRTPEVTCVVVDVSHEDPEVKFNWYVDGVEVHNAKTKPR |
| | | EEQYNSTYRVVSVLTVLHQDWLNGKEYKCKVSNKALPAPIEKTISKAKGQPREPQV |
| | | YTLPPSREEMTKNQVSLTCLVKGFYPSDIAVEWESNGQPENNYKTTPPVLDSDGSFF |
| | | LYSKLTVDKSRWQQGNVFSCSVMHEALHNHYTQKSLSLSPG |
| TIGIT-31-42 | 1832 | MKHLWFFLLLVAAPRWVLSEVQLVESGGGLVQPGGSLRLSCAASGFTFSTHWMG |
| | | WFRQAPGKEREFVASIGSSGTTRYADSVKGRFTISADNSKNTAYLQMNSLKPEDTA |
| | | VYYCAADVWYGSTWRNWGQGTLVTVSSGGGGSEPKSSDKTHTCPPCPAPELLGGP |
| | | SVFLFPPKPKDTLMISRTPEVTCVVVDVSHEDPEVKFNWYVDGVEVHNAKTKPREE |
| | | QYNSTYRVVSVLTVLHQDWLNGKEYKCKVSNKALPAPIEKTISKAKGQPREPQVYT |
| | | LPPSREEMTKNQVSLTCLVKGFYPSDIAVEWESNGQPENNYKTTPPVLDSDGSFFLY |
| | | SKLTVDKSRWQQGNVFSCSVMHEALHNHYTQKSLSLSPG |
| TIGIT-31-43 | 1833 | MKHLWFFLLLVAAPRWVLSEVQLVESGGGLVQPGGSLRLSCAASGGTFSAFPMGW |
| | | FRQAPGKERELVAAISSGGTTYYADSVKGRFTISADNSKNTAYLQMNSLKPEDTAV |
| | | YYCAAQGGVLSAWDWGQGTLLTVSSGGGGSEPKSSDKTHTCPPCPAPELLGGPSV |
| | | FLFPPKPKDTLMISRTPEVTCVVVDVSHEDPEVKFNWYVDGVEVHNAKTKPREEQY |
| | | NSTYRVVSVLTVLHQDWLNGKEYKCKVSNKALPAPIEKTISKAKGQPREPQVYTLP |
| | | PSREEMTKNQVSLTCLVKGFYPSDIAVEWESNGQPENNYKTTPPVLDSDGSFFLYSK |
| | | LTVDKSRWQQGNVFSCSVMHEALHNHYTQKSLSLSPG |
| TIGIT-31-44 | 1834 | MKHLWFFLLLVAAPRWVLSEVQLVESGGGLVQPGGSLRLSCAASGFTFSGNWMG |
| | | WFRQAPGKEREWVASISSGGTTNYADSVKGRFTISADNSKNTAYLQMNSLKPEDTA |
| | | VYYCAADVWYGSTWRNWGQGTLVTVSSGGGGSEPKSSDKTHTCPPCPAPELLGGP |
| | | SVFLFPPKPKDTLMISRTPEVTCVVVDVSHEDPEVKFNWYVDGVEVHNAKTKPREE |
| | | QYNSTYRVVSVLTVLHQDWLNGKEYKCKVSNKALPAPIEKTISKAKGQPREPQVYT |
| | | LPPSREEMTKNQVSLTCLVKGFYPSDIAVEWESNGQPENNYKTTPPVLDSDGSFFLY |
| | | SKLTVDKSRWQQGNVFSCSVMHEALHNHYTQKSLSLSPG |
| TIGIT-31-45 | 1835 | MKHLWFFLLLVAAPRWVLSEVQLVESGGGLVQPGGSLRLSCAASGFTFSGNWMG |
| | | WFRQAPGKEREFVAGVNSNGYINYADSVKGRFTISADNSKNTAYLQMNSLKPEDT |
| | | AVYYCAADVWYGSTWRNWGQGTLVTVSSGGGGSEPKSSDKTHTCPPCPAPELLG |
| | | GPSVFLFPPKPKDTLMISRTPEVTCVVVDVSHEDPEVKFNWYVDGVEVHNAKTKPR |
| | | EEQYNSTYRVVSVLTVLHQDWLNGKEYKCKVSNKALPAPIEKTISKAKGQPREPQV |
| | | YTLPPSREEMTKNQVSLTCLVKGFYPSDIAVEWESNGQPENNYKTTPPVLDSDGSFF |
| | | LYSKLTVDKSRWQQGNVFSCSVMHEALHNHYTQKSLSLSPG |
| TIGIT-31-46 | 1836 | MKHLWFFLLLVAAPRWVLSEVQLVESGGGLVQPGGSLRLSCAASGFTFDRSWMG |
| | | WFRQAPGKERELVASITSGGTTSYADSVKGRFTISADNSKNTAYLQMNSLKPEDTA |
| | | VYYCAADVWYGSTWRNWGQGTLVTVSSGGGGSEPKSSDKTHTCPPCPAPELLGGP |
| | | SVFLFPPKPKDTLMISRTPEVTCVVVDVSHEDPEVKFNWYVDGVEVHNAKTKPREE |
| | | QYNSTYRVVSVLTVLHQDWLNGKEYKCKVSNKALPAPIEKTISKAKGQPREPQVYT |
| | | LPPSREEMTKNQVSLTCLVKGFYPSDIAVEWESNGQPENNYKTTPPVLDSDGSFFLY |
| | | SKLTVDKSRWQQGNVFSCSVMHEALHNHYTQKSLSLSPG |
| TIGIT-31-47 | 1837 | MKHLWFFLLLVAAPRWVLSEVQLVESGGGLVQPGGSLRLSCAASGFTFSGNWMG |
| | | WFRQAPGKEREWVVGISSGGTPHYADSVKGRFTISADNSKNTAYLQMNSLKPEDT |
| | | AVYYCAADVWYGSTWRNWGQGTLVTVSSGGGGSEPKSSDKTHTCPPCPAPELLG |
| | | GPSVFLFPPKPKDTLMISRTPEVTCVVVDVSHEDPEVKFNWYVDGVEVHNAKTKPR |
| | | EEQYNSTYRVVSVLTVLHQDWLNGKEYKCKVSNKALPAPIEKTISKAKGQPREPQV |
| | | YTLPPSREEMTKNQVSLTCLVKGFYPSDIAVEWESNGQPENNYKTTPPVLDSDGSFF |
| | | LYSKLTVDKSRWQQGNVFSCSVMHEALHNHYTQKSLSLSPG |
| TIGIT-31-48 | 1838 | MKHLWFFLLLVAAPRWVLSEVQLVESGGGLVQPGGSLRLSCAASGFTLSSNWMG |
| | | WFRQAPGKERELVAGVNSNGYINYADSVKGRFTISADNSKNTAYLQMNSLKPEDT |
| | | AVYYCAADVWYGSTWRNWGQGTLVTVSSGGGGSEPKSSDKTHTCPPCPAPELLG |
| | | GPSVFLFPPKPKDTLMISRTPEVTCVVVDVSHEDPEVKFNWYVDGVEVHNAKTKPR |
| | | EEQYNSTYRVVSVLTVLHQDWLNGKEYKCKVSNKALPAPIEKTISKAKGQPREPQV |
| | | YTLPPSREEMTKNQVSLTCLVKGFYPSDIAVEWESNGQPENNYKTTPPVLDSDGSFF |
| | | LYSKLTVDKSRWQQGNVFSCSVMHEALHNHYTQKSLSLSPG |
| TIGIT-31-49 | 1839 | MKHLWFFLLLVAAPRWVLSEVQLVESGGGLVQPGGSLRLSCAASGFDFSVSWMG |
| | | WFRQAPGKERELVARISSGGELPYYADSVKGRFTISADNSKNTAYLQMNSLKPKHT |
| | | AVYYCAARPNTRPGSMWGQGTLVTVSSGGGGSEPKSSDKTHTCPPCPAPELLGGPS |
| | | VFLFPPKPKDTLMISRTPEVTCVVVDVSHEDPEVKFNWYVDGVEVHNAKTKPREEQ |
| | | YNSTYRVVSVLTVLHQDWLNGKEYKCKVSNKALPAPIEKTISKAKGQPREPQVYTL |
| | | PPSREEMTKNQVSLTCLVKGFYPSDIAVEWESNGQPENNYKTTPPVLDSDGSFFLYS |
| | | KLTVDKSRWQQGNVFSCSVMHEALHNHYTQKSLSLSPG |
| TIGIT-31-50 | 1840 | MKHLWFFLLLVAAPRWVLSEVQLVESGGGLVQPGGSLRLSCAASGFTMSSSWMG |
| | | WFRQAPGKEREFVGGISSGGSTYYADSVKGRFTISADNSKNTAYLQMNSLKPEDTA |
| | | VYYCAADVWYGSTWRNWGQGTLVTVSSGGGGSEPKSSDKTHTCPPCPAPELLGGP |
| | | SVFLFPPKPKDTLMISRTPEVTCVVVDVSHEDPEVKFNWYVDGVEVHNAKTKPREE |
| | | QYNSTYRVVSVLTVLHQDWLNGKEYKCKVSNKALPAPIEKTISKAKGQPREPQVYT |
| | | LPPSREEMTKNQVSLTCLVKGFYPSDIAVEWESNGQPENNYKTTPPVLDSDGSFFLY |
| | | SKLTVDKSRWQQGNVFSCSVMHEALHNHYTQKSLSLSPG |
| TIGIT-31-51 | 1841 | MKHLWFFLLLVAAPRWVLSEVQLVESGGGLVQPGGSLRLSCAASGRNFRRNSMG |
| | | WFRQAPGKEREFVAVITRSGGGEVTTYADSVKGRFTISADNSKNTAYLQMNSLKPE |
| | | DTAVYYCAMSSVTRGSSDWGQGTLVTVSSGGGGSEPKSSDKTHTCPPCPAPELLGG |
| | | PSVFLFPPKPKDTLMISRTPEVTCVVVDVSHEDPEVKFNWYVDGVEVHNAKTKPRE |
| | | EQYNSTYRVVSVLTVLHQDWLNGKEYKCKVSNKALPAPIEKTISKAKGQPREPQVY |
| | | TLPPSREEMTKNQVSLTCLVKGFYPSDIAVEWESNGQPENNYKTTPPVLDSDGSFFL |
| | | YSKLTVDKSRWQQGNVFSCSVMHEALHNHYTQKSLSLSPG |
| TIGIT-31-52 | 1842 | MKHLWFFLLLVAAPRWVLSEVQLVESGGGLVQPGGSLRLSCAASGFTFDRSWMG |
| | | WFRQAPGKEREFVAGITSSGIPNYADSVKGRFTISADNSKNTAYLQMNSLKPEDTA |
| | | VYYCAADVWYGSTWRNWGQGTLVTVSSGGGGSEPKSSDKTHTCPPCPAPELLGGP |
| | | SVFLFPPKPKDTLMISRTPEVTCVVVDVSHEDPEVKFNWYVDGVEVHNAKTKPREE |
| | | QYNSTYRVVSVLTVLHQDWLNGKEYKCKVSNKALPAPIEKTISKAKGQPREPQVYT |
| | | LPPSREEMTKNQVSLTCLVKGFYPSDIAVEWESNGQPENNYKTTPPVLDSDGSFFLY |
| | | SKLTVDKSRWQQGNVFSCSVMHEALHNHYTQKSLSLSPG |
| TIGIT-31-53 | 1843 | MKHLWFFLLLVAAPRWVLSEVQLVESGGGLVQPGGSLRLSCAASGLTISTYNMGW |
| | | FRQAPGKERELVSAIGWSGASTYYADSVKGRFTISADNSKNTAYLQMNSLKPEDTA |
| | | VYYCAAFRGRMYDWGQGTLVTVSSGGGGSEPKSSDKTHTCPPCPAPELLGGPSVFL |
| | | FPPKPKDTLMISRTPEVTCVVVDVSHEDPEVKFNWYVDGVEVHNAKTKPREEQYN |
| | | STYRVVSVLTVLHQDWLNGKEYKCKVSNKALPAPIEKTISKAKGQPREPQVYTLPP |
| | | SREEMTKNQVSLTCLVKGFYPSDIAVEWESNGQPENNYKTTPPVLDSDGSFFLYSKL |
| | | TVDKSRWQQGNVFSCSVMHEALHNHYTQKSLSLSPG |
| TIGIT-31-54 | 1844 | MKHLWFFLLLVAAPRWVLSEVQLVESGGGLVQPGGSLRLSCAASGFTFSTSWMGW |
| | | FRQAPGKERELVAAVTSGGNTNYADSVKGRFTISADNSKNTAYLQMNSLKPEDTA |
| | | VYYCAADVWYGSTWRNWGQGTLVTVSSGGGGSEPKSSDKTHTCPPCPAPELLGGP |
| | | SVFLFPPKPKDTLMISRTPEVTCVVVDVSHEDPEVKFNWYVDGVEVHNAKTKPREE |
| | | QYNSTYRVVSVLTVLHQDWLNGKEYKCKVSNKALPAPIEKTISKAKGQPREPQVYT |
| | | LPPSREEMTKNQVSLTCLVKGFYPSDIAVEWESNGQPENNYKTTPPVLDSDGSFFLY |
| | | SKLTVDKSRWQQGNVFSCSVMHEALHNHYTQKSLSLSPG |
| TIGIT-31-55 | 1845 | MKHLWFFLLLVAAPRWVLSEVQLVESGGGLVQPGGSLRLSCAASGRTFGDYIMGW |
| | | FRQAPGKERELVAEITRVGNTNYADSVKGRFTISADNSKNTAYLQMNSLKPEDTAV |
| | | YYCAAVFSRGPLTWGQGTLVTVSSGGGGSEPKSSDKTHTCPPCPAPELLGGPSVFLF |
| | | PPKPKDTLMISRTPEVTCVVVDVSHEDPEVKFNWYVDGVEVHNAKTKPREEQYNS |
| | | TYRVVSVLTVLHQDWLNGKEYKCKVSNKALPAPIEKTISKAKGQPREPQVYTLPPS |
| | | REEMTKNQVSLTCLVKGFYPSDIAVEWESNGQPENNYKTTPPVLDSDGSFFLYSKL |
| | | TVDKSRWQQGNVFSCSVMHEALHNHYTQKSLSLSPG |
| TIGIT-31-56 | 1846 | MKHLWFFLLLVAAPRWVLSEVQLVESGGGLVQPGGSLRLSCAASGRIFRRNSMGW |
| | | FRQAPGKEREFVAVITRSGGGEVTTYADSVKGRFTINADNSKNTAYLQMNSLKPED |
| | | TAVYYCAMSSVTRGSSDWGQGTLVTVSTGGGGSEPKSSDKTHTCPPCPAPELLGGP |
| | | SVFLFPPKPKDTLMISRTPEVTCVVVDVSHEDPEVKFNWYVDGVEVHNAKTKPREE |
| | | QYNSTYRVVSVLTVLHQDWLNGKEYKCKVSNKALPAPIEKTISKAKGQPREPQVYT |
| | | LPPSREEMTKNQVSLTCLVKGFYPSDIAVEWESNGQPENNYKTTPPVLDSDGSFFLY |
| | | SKLTVDKSRWQQGNVFSCSVMHEALHNHYTQKSLSLSPG |

[0175] While preferred embodiments of the present disclosure have been shown and described herein, it will be obvious to those skilled in the art that such embodiments are provided by way of example only. Numerous variations, changes, and substitutions will now occur to those skilled in the art without departing from the disclosure. It should be understood that various alternatives to the embodiments of the disclosure described herein may be employed in practicing the disclosure. It is intended that the following claims define the scope of the disclosure and that methods and structures within the scope of these claims and their equivalents be covered thereby.

What is claimed is:

1. An antibody or antibody fragment comprising an amino acid sequence at least about 90% identical to that set forth in any one of SEQ ID NOs: 35-44 or 62-1846.

2. The antibody or antibody fragment of claim 1, wherein the antibody or antibody fragment comprises an amino acid sequence at least about 95% identical to that set forth in any one of SEQ ID NOs: 35-44 or 62-1846.

3. The antibody or antibody fragment of claim 1, wherein the antibody or antibody fragment comprises an amino acid sequence as set forth in any one of SEQ ID NOs: 35-44.

4. The antibody or antibody fragment of claim 1, wherein the antibody is a monoclonal antibody, a polyclonal antibody, a bi-specific antibody, a multispecific antibody, a grafted antibody, a human antibody, a humanized antibody, a synthetic antibody, a chimeric antibody, a camelized antibody, a single-chain Fvs (scFv), a single chain antibody, a Fab fragment, a F(ab')2 fragment, a Fd fragment, a Fv fragment, a single-domain antibody, an isolated complementarity determining region (CDR), a diabody, a fragment comprised of only a single monomeric variable domain, disulfide-linked Fvs (sdFv), an intrabody, an anti-idiotypic (anti-Id) antibody, or ab antigen-binding fragments thereof.

5. The antibody or antibody fragment of claim 1, wherein the antibody or antibody fragment binds to TIGIT with a K_{D} of less than 75 nM.

6. The antibody or antibody fragment of claim 1, wherein the antibody or antibody fragment binds to TIGIT with a K_{D} of less than 50 nM.

7. The antibody or antibody fragment of claim 1, wherein the antibody or antibody fragment binds to TIGIT with a K_{D} of less than 25 nM.

8. The antibody or antibody fragment of claim 1, wherein the antibody or antibody fragment binds to TIGIT with a K_{D} of less than 10 nM.

9. An antibody or antibody fragment that binds TIGIT, comprising an immunoglobulin heavy chain comprising an amino acid sequence at least about 90% identical to that set forth in any one of SEQ ID NOs: 35-44.

10. The antibody or antibody fragment of claim 9, wherein the immunoglobulin heavy chain comprises an amino acid sequence at least about 95% identical to that set forth in any one of SEQ ID NOs: 35-44.

11. The antibody or antibody fragment of claim 9, wherein the immunoglobulin heavy chain comprises an amino acid sequence as set forth in any one of SEQ ID NOs: 35-44 or 62-1846.

12. The antibody or antibody fragment of claim 9, wherein the antibody is a monoclonal antibody, a polyclonal antibody, a bi-specific antibody, a multispecific antibody, a grafted antibody, a human antibody, a humanized antibody, a synthetic antibody, a chimeric antibody, a camelized antibody, a single-chain Fvs (scFv), a single chain antibody, a Fab fragment, a F(ab')2 fragment, a Fd fragment, a Fv fragment, a single-domain antibody, an isolated complementarity determining region (CDR), a diabody, a fragment comprised of only a single monomeric variable domain, disulfide-linked Fvs (sdFv), an intrabody, an anti-idiotypic (anti-Id) antibody, or ab antigen-binding fragments thereof.

13. The antibody or antibody fragment of claim 9, wherein the antibody or antibody fragment thereof is chimeric or humanized.

14. The antibody or antibody fragment of claim 9, wherein the antibody or antibody fragment binds to TIGIT with a K_{D} of less than 75 nM.

15. The antibody or antibody fragment of claim 9, wherein the antibody or antibody fragment binds to TIGIT with a K_{D} of less than 50 nM.

16. The antibody or antibody fragment of claim 9, wherein the antibody or antibody fragment binds to TIGIT with a K_{D} of less than 25 nM.

17. The antibody or antibody fragment of claim 9, wherein the antibody or antibody fragment binds to TIGIT with a K_{D} of less than 10 nM.

18. A method of treating a disease or condition comprising administering the antibody or antibody fragment of claim 1.

19. The method of claim 18, wherein the disease is a viral infection.

20. The method of claim 18, wherein the disease is cancer.

The application's sequence listing, which the Patent Office published only in electronic form, follows.

SEQUENCE LISTING (2244 sequences)

SEQ ID NO: 1 - protein, 15 aa, Artificial Sequence
  Description of Artificial Sequence: Synthetic peptide
CARVAGSSGWAFDYW

SEQ ID NO: 2 - protein, 16 aa, Artificial Sequence
  Description of Artificial Sequence: Synthetic peptide
CATLRLYSSGGGIDYW

SEQ ID NO: 3 - protein, 20 aa, Artificial Sequence
  Description of Artificial Sequence: Synthetic peptide
CARIVGATTRTYYYYGMDVW

SEQ ID NO: 4 - protein, 12 aa, Artificial Sequence
  Description of Artificial Sequence: Synthetic peptide
CARVRNRASDIW

SEQ ID NO: 5 - protein, 15 aa, Artificial Sequence
  Description of Artificial Sequence: Synthetic peptide
CARAPYSSSSWFDYW

SEQ ID NO: 6 - protein, 17 aa, Artificial Sequence
  Description of Artificial Sequence: Synthetic peptide
CARNSYGPPRSFGMDVW

SEQ ID NO: 7 - protein, 14 aa, Artificial Sequence
  Description of Artificial Sequence: Synthetic peptide
CARTPYRSGWADYW

SEQ ID NO: 8 - protein, 14 aa, Artificial Sequence
  Description of Artificial Sequence: Synthetic peptide
CTRSWYYYYGMDVW

SEQ ID NO: 9 - protein, 11 aa, Artificial Sequence
  Description of Artificial Sequence: Synthetic peptide
CARGYGGYGYW

SEQ ID NO: 10 - protein, 14 aa, Artificial Sequence
  Description of Artificial Sequence: Synthetic peptide
CAKAGDYDYYFDYW

SEQ ID NO: 11 - protein, 14 aa, Artificial Sequence
  Description of Artificial Sequence: Synthetic peptide
CASVKRWGYYFNWW

SEQ ID NO: 12 - protein, 15 aa, Artificial Sequence
  Description of Artificial Sequence: Synthetic peptide
CARVRVGAYDAFDIW

SEQ ID NO: 13 - protein, 14 aa, Artificial Sequence
  Description of Artificial Sequence: Synthetic peptide
CARNSGWFMPFDYW

SEQ ID NO: 14 - protein, 13 aa, Artificial Sequence
  Description of Artificial Sequence: Synthetic peptide
CARRGSGWYIDSW

SEQ ID NO: 15 - protein, 17 aa, Artificial Sequence
  Description of Artificial Sequence: Synthetic peptide
CARREGDYMGPNWFDPW

SEQ ID NO: 16 - protein, 12 aa, Artificial Sequence
  Description of Artificial Sequence: Synthetic peptide
CASIRERRFDFW

SEQ ID NO: 17 - protein, 23 aa, Artificial Sequence
  Description of Artificial Sequence: Synthetic peptide
CARHSLTPYNFWSGYYSRSFDIW

SEQ ID NO: 18 - protein, 120 aa, Artificial Sequence
  Description of Artificial Sequence: Synthetic polypeptide
EVQLLESGGGLVQPGGSLRLSCAASGFTFGSYGMSWVRQAPGKGLEWVSSISGSGSTTYYADSVKGRFTISRDNSKNTLYLQMNSLRAEDTAVYYCARVAGSSGWAFDYWGQGTLVTVSS

SEQ ID NO: 19 - protein, 121 aa, Artificial Sequence
  Description of Artificial Sequence: Synthetic polypeptide
EVQLLESGGGLVQPGGSLRLSCAASGLTFSNYAMTWVRQAPGKGLEWVSGISRSGGSTYYADSVKGRFTISRDNSKNTLYLQMNSLRAEDTAVYYCATLRLYSSGGGIDYWGQGTLVTVSS

SEQ ID NO: 20 - protein, 125 aa, Artificial Sequence
  Description of Artificial Sequence: Synthetic polypeptide
EVQLLESGGGLVQPGGSLRLSCAASGFTFHNYAMTWVRQAPGKGLEWVSAITGSGTSTYYADSVKGRFTISRDNSKNTLYLQMNSLRAEDTAVYYCARIVGATTRTYYYYGMDVWGQGTLVTVSS

SEQ ID NO: 21 - protein, 117 aa, Artificial Sequence
  Description of Artificial Sequence: Synthetic polypeptide
EVQLLESGGGLVQPGGSLRLSCAASGFRFGNYAMSWVRQAPGKGLEWVSAITGSGGNTFYADSVKGRFTISRDNSKNTLYLQINSLRAEDTAVYYCARVRNRASDIWGQGTLVTVSS

SEQ ID NO: 22 - protein, 120 aa, Artificial Sequence
  Description of Artificial Sequence: Synthetic polypeptide
EVQLLESGGGLVQPGGSLRLSCAASGFVFSSYAMNWVRQAPGKGLEWVSTVSGSGGTTYYADSVKGRFTISRDNSKNTLYLQMNSLRAEDTAVYYCARAPYSSSSWFDYWGQGTLVTVSS

SEQ ID NO: 23 - protein, 122 aa, Artificial Sequence
  Description of Artificial Sequence: Synthetic polypeptide
EVQLLESGGGLVQPGGSLRLSCAASGFTFSRYTMNWVRQAPGKGLEWVSGISGSGGGAYYADSVKGRFTISRDNSKNTLYLQMNSLRAEDTAVYYCARNSYGPPRSFGMDVWGQGTLVTVSS

SEQ ID NO: 24 - protein, 119 aa, Artificial Sequence
  Description of Artificial Sequence: Synthetic polypeptide
EVQLLESGGGLVQPGGSLRLSCAASGFTFSSYGMTWVRQAPGKGLEWVSAISGRGSSTYYADSVKGRFTISRDNSKNTLYLQMNSLRAEDTAVYYCARTPYRSGWADYWGQGTLVTVSS

SEQ ID NO: 25 - protein, 119 aa, Artificial Sequence
  Description of Artificial Sequence: Synthetic polypeptide
EVQLLESGGGLVQPGGSLRLSCAASGFMFSDYAMSWVRQAPGKGLEWVSGISGSGGYTYYADSVKGRFTISRDNSKNTLYLQMNSLRAEDTAVYYCTRSWYYYYGMDVWGQGTLVTVSS

SEQ ID NO: 26 - protein, 116 aa, Artificial Sequence
  Description of Artificial Sequence: Synthetic polypeptide
EVQLLESGGGLVQPGGSLRLSCAASGFAFRSYAMGWVRQAPGKGLEWVSTISGGGGNTYYADSVKGRFTISRDNSKNTLYLQMNSLRAEDTAVYYCARGYGGYGYWGQGTLVTVSS

SEQ ID NO: 27 - protein, 119 aa, Artificial Sequence
  Description of Artificial Sequence: Synthetic polypeptide
EVQLLESGGGLVQPGGSLRLSCAASGFTFSKSAMSWVRQAPGKGLEWVSAISGSGGLTYYADSVKGRFTISRDNSKNTLYLQMNSLRAEDTAVYYCAKAGDYDYYFDYWGQGTLVTVSS

SEQ ID NO: 28 - protein, 119 aa, Artificial Sequence
  Description of Artificial Sequence: Synthetic polypeptide
EVQLLESGGGLVQPGGSLRLSCAASGFTFTNYGMSWVRQAPGKGLEWVSSISGSGSTTYYADSVKGRFTISRDNSKNTLYLQMNSLRAEDTAVYYCASVKRWGYYFNWWGQGTLVTVSS

SEQ ID NO: 29 - protein, 120 aa, Artificial Sequence
  Description of Artificial Sequence: Synthetic polypeptide
EVQLLESGGGLVQPGGSLRLSCAASGFTLSSYAMAWVRQAPGKGLEWVSTLSGSGGSTYYADSVKGRFTISRDNSKNTLYLQMNSLRAEDTAVYYCARVRVGAYDAFDIWGQGTLVTVSS

SEQ ID NO: 30 - protein, 119 aa, Artificial Sequence
  Description of Artificial Sequence: Synthetic polypeptide
EVQLLESGGGLVQPGGSLRLSCAASGFTFSTYGMNWVRQAPGKGLEWVSTISGSGGSTYFADSVKGRFTISRDNSKNTLYLQMNSLRAEDTAVYYCARNSGWFMPFDYWGQGTLVTVSS

SEQ ID NO: 31 - protein, 118 aa, Artificial Sequence
  Description of Artificial Sequence: Synthetic polypeptide
EVQLLESGGGLVQPGGSLRLSCAASGFMFSRYAMSWVRQAPGKGLEWVSSISGSGGTTYYADSVKGRFTISRDNSKNTLYLQMNSLRAEDTAVYYCARRGSGWYIDSWGQGTLVTVSS

SEQ ID NO: 32 - protein, 122 aa, Artificial Sequence
  Description of Artificial Sequence: Synthetic polypeptide
EVQLLESGGGLVQPGGSLRLSCAASGFTFSDYAMGWVRQAPGKGLEWVSTISGSGSRTYYADSVKGRFTISRDNSKNTLYLQMNSLRAEDTAVYYCARREGDYMGPNWFDPWGQGTLVTVSS

SEQ ID NO: 33 - protein, 117 aa, Artificial Sequence
  Description of Artificial Sequence: Synthetic polypeptide
EVQLLESGGGLVQPGGSLRLSCAASGFAFSSYAMGWVRQAPGKGLEWVSAITSSGGGTYYADSVKGRFTISRDNSKNTLYLQMNSLRAEDTAVYYCASIRERRFDFWGQGTLVTVSS

SEQ ID NO: 34 - protein, 128 aa, Artificial Sequence
  Description of Artificial Sequence: Synthetic polypeptide
EVQLLESGGGLVQPGGSLRLSCAASGFTFSNHAMAWVRQAPGKGLEWVSGISGSGGYTYYADSVKGRFTISRDNSKNTLYLQMNSLRAEDTAVYYCARHSLTPYNFWSGYYSRSFDIWGQGTLVTVSS

SEQ ID NO: 35 - protein, 119 aa, Artificial Sequence
  Description of Artificial Sequence: Synthetic polypeptide
EVQLVESGGGLVQAGGSLRLSCAASGSIFSNYAMGWFRQAPGKEREFVATISRGGTRTNYADSVKGRFTISADNAKNTVYLQMNSLKPEDTAVYYCAAAAWTIYAYNYWGQGTQVTVSS

SEQ ID NO: 36 - protein, 124 aa, Artificial Sequence
  Description of Artificial Sequence: Synthetic polypeptide
EVQLVESGGGLVQAGGSLRLSCAASGRTFSNYGMGWFRQAPGKEREFVSGISGSGGRTSYADSVKGRFTISADNAKNTVYLQMNSLKPEDTAVYYCAANLWYPVDRLNTGFNYWGQGTQVTVSS

SEQ ID NO: 37 - protein, 116 aa, Artificial Sequence
  Description of Artificial Sequence: Synthetic polypeptide
EVQLVESGGGLVQAGGSLRLSCAASGGTFSGRGMGWFRQAPGKEREWVSSVYIFGGSTYYADSVKGRFTISADNAKNTVYLQMNSLKPEDTAVYYCANSNKPKFDWGQGTQVTVSS

SEQ ID NO: 38 - protein, 118 aa, Artificial Sequence
  Description of Artificial Sequence: Synthetic polypeptide
EVQLVESGGGLVQAGGSLRLSCAASGFTFSTSWMGWFRQAPGKERELVAARNSGGNTNYADSVKGRFTISADNAKNTVYLQMNSLKPEDTAVYYCAADVWYGSTWRNWGQGTQVTVSS

SEQ ID NO: 39 - protein, 118 aa, Artificial Sequence
  Description of Artificial Sequence: Synthetic polypeptide
EVQLVESGGGLVQPGGSLRLSCAASGFTFDRSWMGWFRQAPGKEREVVASITSGGSTYYADSVKGRFTISADNSKNTAYLQMNSLKPEDTAVYYCAADVWYGSTWRNWGQGTLVTVSS

SEQ ID NO: 40 - protein, 118 aa, Artificial Sequence
  Description of Artificial Sequence: Synthetic polypeptide
EVQLVESGGGLVQPGGSLRLSCAASGFTFSTSWMGWFRQAPGKERELVASITSGGSTYYADSVKGRFTISADNSKNTAYLQMNSLKPEDTAVYYCAADVWYGSTWRNWGQGTLVTVSS

SEQ ID NO: 41 - protein, 118 aa, Artificial Sequence
  Description of Artificial Sequence: Synthetic polypeptide
EVQLVESGGGLVQPGGSLRLSCAASGFTFSTSWMGWFRQAPGKERELVAARNSGGNTNYADSVKGRFTISADNSKNTAYLQMNSLKPEDTAVYYCAADVWYGSTWRNWGQGTLVTVSS

SEQ ID NO: 42 - protein, 118 aa, Artificial Sequence
  Description of Artificial Sequence: Synthetic polypeptide
EVQLVESGGGLVQPGGSLRLSCAASGFTFDRSWMGWFRQAPGKERELVAAITSGGSTYYADSVKGRFTISADNSKNTAYLQMNSLKPEDTAVYYCAADVWYGSTWRNWGQGTLVTVSS

SEQ ID NO: 43 - protein, 118 aa, Artificial Sequence
  Description of Artificial Sequence: Synthetic polypeptide
EVQLVESGGGLVQPGGSLRLSCAASGFTFSTSWMGWFRQAPGKERELVAAMTSGGGTNYADSVKGRFTISADNSKNTAYLQMNSLKPEDTAVYYCAADVWYGSTWRNWGQGTLVTVSS

SEQ ID NO: 44 - protein, 120 aa, Artificial Sequence
  Description of Artificial Sequence: Synthetic polypeptide
EVQLVESGGGLVQPGGSLRLSCAASGRIFRRNSMGWFRQAPGKEREFVAVITRSGGGEVTTYADSVKGRFTINADNSKNTAYLQMNSLKPEDTAVYYCAMSSVTRGSSDWGQGTLVTVST

SEQ ID NO: 45 - protein, 107 aa, Artificial Sequence
  Description of Artificial Sequence: Synthetic polypeptide
DIQMTQSPSSLSASVGDRVTITCRASQAISNYLNWYQQKPGKAPKLLIYAASRLQSGVPSRFSGSGSGTDFTLTISSLQPEDFATYYCQESYSTPFTFGGGTKVEIK

SEQ ID NO: 46 - protein, 107 aa, Artificial Sequence
  Description of Artificial Sequence: Synthetic polypeptide
DIQMTQSPSSLSASVGDRVTITCRASQYISTYLNWYQQKPGKAPKLLIYAASSLQGGVPSRFSGSGSGTDFTLTISSLQPEDFATYYCQQNYITPLTFGGGTKVEIK

SEQ ID NO: 47 - protein, 107 aa, Artificial Sequence
  Description of Artificial Sequence: Synthetic polypeptide
DIQMTQSPSSLSASVGDRVTITCRASQYISSYLNWYQQKPGKAPKLLIYGAFSLQSGVPSRFSGSGSGTDFTLTISSLQPEDFATYYCQQSYITPYTFGGGTKVEIK

SEQ ID NO: 48 - protein, 107 aa, Artificial Sequence
  Description of Artificial Sequence: Synthetic polypeptide
DIQMTQSPSSLSASVGDRVTITCRASQTIITYLNWYQQKPGKAPKLLIYAASNLRSGVPSRFSGSGSGTDFTLTISSLQPEDFATYYCQQSYSLPWTFGGGTKVEIK

SEQ ID NO: 49 - protein, 107 aa, Artificial Sequence
  Description of Artificial Sequence: Synthetic polypeptide
DIQMTQSPSSLSASVGDRVTITCRASQSVRSYLNWYQQKPGKAPKLLIYTATSLESGVPSRFSGSGSGTDFTLTISSLQPEDFATYYCQQSYGLPRTFGGGTKVEIK

SEQ ID NO: 50 - protein, 107 aa, Artificial Sequence
  Description of Artificial Sequence: Synthetic polypeptide
DIQMTQSPSSLSASVGDRVTITCRASQSISKYLNWYQQKPGKAPKLLIYGASSLRGGVPSRFSGSGSGTDFTLTISSLQPEDFATYYCQQSYRPPLTFGGGTKVEIK

SEQ ID NO: 51 - protein, 107 aa, Artificial Sequence
  Description of Artificial Sequence: Synthetic polypeptide
DIQMTQSPSSLSASVGDRVTITCRASQNIKTYLNWYQQKPGKAPKLLIYAASSLHTGVPSRFSGSGSGTDFTLTISSLQPEDFATYYCQQTYSIPQTFGGGTKVEIK

SEQ ID NO: 52 - protein, 108 aa, Artificial Sequence
  Description of Artificial Sequence: Synthetic polypeptide
DIQMTQSPSSLSASVGDRVTITCRAGQSIRSYLNWYQQKPGKAPKLLIYASSNLQSGVPSRFSGSGSGTDFTLTISSLQPEDFATYYCQQSYSTPLLTFGGGTKVEIK

SEQ ID NO: 53 - protein, 107 aa, Artificial Sequence
  Description of Artificial Sequence: Synthetic polypeptide
DIQMTQSPSSLSASVGDRVTITCRASQSIRRYLNWYQQKPGKAPKLLIYAASTLQIGVPSRFSGSGSGTDFTLTISSLQPEDFATYYCQQTYSSPYTFGGGTKVEIK

SEQ ID NO: 54 - protein, 107 aa, Artificial Sequence
  Description of Artificial Sequence: Synthetic polypeptide
DIQMTQSPSSLSASVGDRVTITCRTSQSIRRYLNWYQQKPGKAPKLLIYRASRLQSGVPSRFSGSGSGTDFTLTISSLQPEDFATYYCQQSYNTLRTFGGGTKVEIK

SEQ ID NO: 55 - protein, 106 aa, Artificial Sequence
  Description of Artificial Sequence: Synthetic polypeptide
DIQMTQSPSSLSASVGDRVTITCRASQNINYYLNWYQQKPGKAPKLLIYGASSLQNGVPSRFSGSGSGTDFTLTISSLQPEDFATYYCQQSYITPYTGGGTKVEIK

SEQ ID NO: 56 - protein, 107 aa, Artificial Sequence
  Description of Artificial Sequence: Synthetic polypeptide
DIQMTQSPYSLSASVGDRVTITCRASQSIRRYLNWYQQKPGKAPKLLIYRASTLQTGVPSRFSGSGSGTDFTLTISSLQPEDFATYYCQQTYSSPFTFGGGTKVEIK

SEQ ID NO: 57 - protein, 107 aa, Artificial Sequence
  Description of Artificial Sequence: Synthetic polypeptide
DIQMTQSPSSLSASVGDRVTITCRTSQSISTYLNWYQQKPGKAPKLLIYATSRLQSGVPSRFSGSGSGTDFTLTISSLQPEDFATYYCQQSYTTPLTFGGGTKVEIK

SEQ ID NO: 58 - protein, 107 aa, Artificial Sequence
  Description of Artificial Sequence: Synthetic polypeptide
DIQMTQSPSSLSASVGDRVTITCRASQSVSRYLNWYQQKPGKAPKLLIYGSSNLQSGVPSRFSGSGSGTDFTLTISSLQPEDFATYYCQESYSTPFTFGGGTKVEIK

SEQ ID NO: 59 - protein, 107 aa, Artificial Sequence
  Description of Artificial Sequence: Synthetic polypeptide
DIQMTQSPSSLSASVGDRVTITCRASQAISRNLNWYQQKPGKAPKLLIYGASNLQTGVPSRFSGSGSGTDFTLTISSLQPEDFATYYCQQSHSTPVTFGGGTKVEIK

SEQ ID NO: 60 - protein, 107 aa, Artificial Sequence
  Description of Artificial Sequence: Synthetic polypeptide
DIQMTQSPSSLSASVGDRVTITCRASQRISTYLNWYQQKPGKAPKLLIYGTSSLQSGVPSRFSGSGSGTDFTLTISSLQPEDFATYYCQQSYIIPWTFGGGTKVEIK

SEQ ID NO: 61 - protein, 107 aa, Artificial Sequence
  Description of Artificial Sequence: Synthetic polypeptide
DIQMTQSPSSLSASVGDRVTITCRASQSISSYVNWYQQKPGKAPKLLIYGASRLQDGVPSRFSGSGSGTDFTLTISSLQPEDFATYYCQQSYITPYTFGGGTKVEIK

SEQ ID NO: 62 - protein, 9 aa, Artificial Sequence
  Description of Artificial Sequence: Synthetic peptide
RTFSNYAMG

SEQ ID NO: 63 - protein, 9 aa, Artificial Sequence
  Description of Artificial Sequence: Synthetic peptide
RTFDIYAMG

SEQ ID NO: 64 - protein, 9 aa, Artificial Sequence
  Description of Artificial Sequence: Synthetic peptide
FTFSSYAMG

SEQ ID NO: 65 - protein, 9 aa, Artificial Sequence
  Description of Artificial Sequence: Synthetic peptide
STFDTYVMG

SEQ ID NO: 66 - protein, 9 aa, Artificial Sequence
  Description of Artificial Sequence: Synthetic peptide
RTFSIYAMG

SEQ ID NO: 67 - protein, 9 aa, Artificial Sequence
  Description of Artificial Sequence: Synthetic peptide
GTFRSYVMG

SEQ ID NO: 68 - protein, 9 aa, Artificial Sequence
  Description of Artificial Sequence: Synthetic peptide
SIFSNYAMG

SEQ ID NO: 69 - protein, 9 aa, Artificial Sequence
  Description of Artificial Sequence: Synthetic peptide
RTLDDYVMG

SEQ ID NO: 70 - protein, 9 aa, Artificial Sequence
  Description of Artificial Sequence: Synthetic peptide
FTFDNYAMG

SEQ ID NO: 71 - protein, 9 aa, Artificial Sequence
  Description of Artificial Sequence: Synthetic peptide
RTFSNYGMG

SEQ ID NO: 72 - protein, 9 aa, Artificial Sequence
  Description of Artificial Sequence: Synthetic peptide
RTLSSYAMG

SEQ ID NO: 73 - protein, 9 aa, Artificial Sequence
  Description of Artificial Sequence: Synthetic peptide
STFSSYAMG

SEQ ID NO: 74 - protein, 9 aa, Artificial Sequence
  Description of Artificial Sequence: Synthetic peptide
FIFSNYAMG

SEQ ID NO: 75 - protein, 9 aa, Artificial Sequence
  Description of Artificial Sequence: Synthetic peptide
FTFSDYVMG

SEQ ID NO: 76 - protein, 9 aa, Artificial Sequence
  Description of Artificial Sequence: Synthetic peptide
RTFDSYAMG

SEQ ID NO: 77 - protein, 9 aa, Artificial Sequence
  Description of Artificial Sequence: Synthetic peptide
SIFSIYAMG

SEQ ID NO: 78 - protein, 9 aa, Artificial Sequence
  Description of Artificial Sequence: Synthetic peptide
STLSIYAMG

SEQ ID NO: 79 - protein, 9 aa, Artificial Sequence
  Description of Artificial Sequence: Synthetic peptide
STFSNYAMG

SEQ ID NO: 80 - protein, 9 aa, Artificial Sequence
  Description of Artificial Sequence: Synthetic peptide
RTFSSYAMG

SEQ ID NO: 81 - protein, 9 aa, Artificial Sequence
  Description of Artificial Sequence: Synthetic peptide
STFSIYAMG

SEQ ID NO: 82 - protein, 9 aa, Artificial Sequence
  Description of Artificial Sequence: Synthetic peptide
STFSNYAMG

SEQ ID NO: 83 - protein, 9 aa, Artificial Sequence
  Description of Artificial Sequence: Synthetic peptide
SILSSYTMG

SEQ ID NO: 84 - protein, 9 aa, Artificial Sequence
  Description of Artificial Sequence: Synthetic peptide
STFDIYAMG

SEQ ID NO: 85 - protein, 9 aa, Artificial Sequence
  Description of Artificial Sequence: Synthetic peptide
RTFDTYAMG

SEQ ID NO: 86 - protein, 9 aa, Artificial Sequence
  Description of Artificial Sequence: Synthetic peptide
FTFDNYAMG

SEQ ID NO: 87 - protein, 9 aa, Artificial Sequence
  Description of Artificial Sequence: Synthetic peptide
FTFDNYAMG

SEQ ID NO: 88 - protein, 9 aa, Artificial Sequence
  Description of Artificial Sequence: Synthetic peptide
RTFSNNVMG

SEQ ID NO: 89 - protein, 9 aa, Artificial Sequence
  Description of Artificial Sequence: Synthetic peptide
FIFDSYAMG

SEQ ID NO: 90 - protein, 9 aa, Artificial Sequence
  Description of Artificial Sequence: Synthetic peptide
RTFSNYAMG

SEQ ID NO: 91 - protein, 9 aa, Artificial Sequence
  Description of Artificial Sequence: Synthetic peptide
FTFSSYAMG

SEQ ID NO: 92 - protein, 9 aa, Artificial Sequence
  Description of Artificial Sequence: Synthetic peptide
FTFSIYAMG

SEQ ID NO: 93 - protein, 9 aa, Artificial Sequence
  Description of Artificial Sequence: Synthetic peptide
STFDSYAMG

SEQ ID NO: 94 - protein, 9 aa, Artificial Sequence
  Description of Artificial Sequence: Synthetic peptide
FIFSTYAMG

SEQ ID NO: 95 - protein, 9 aa, Artificial Sequence
  Description of Artificial Sequence: Synthetic peptide
FTFRNYAMG

SEQ ID NO: 96 - protein, 9 aa, Artificial Sequence
  Description of Artificial Sequence: Synthetic peptide
RIFSIYTMG

SEQ ID NO: 97 - protein, 9 aa, Artificial Sequence
  Description of Artificial Sequence: Synthetic peptide
FTFSSYAMG

SEQ ID NO: 98 - protein, 9 aa, Artificial Sequence
  Description of Artificial Sequence: Synthetic peptide
RTFSNYAMG

SEQ ID NO: 99 - protein, 9 aa, Artificial Sequence
  Description of Artificial Sequence: Synthetic peptide
STFSSYAMG

SEQ ID NO: 100 - protein, 9 aa, Artificial Sequence
  Description of Artificial Sequence: Synthetic peptide
RTLDDYVMG

SEQ ID NO: 101 - protein, 9 aa, Artificial Sequence
  Description of Artificial Sequence: Synthetic peptide
FTFDNYAMG

SEQ ID NO: 102 - protein, 9 aa, Artificial Sequence
  Description of Artificial Sequence: Synthetic peptide
RTFSTNAMG

SEQ ID NO: 103 - protein, 9 aa, Artificial Sequence
  Description of Artificial Sequence: Synthetic peptide
STFSTYAMG

SEQ ID NO: 104 - protein, 9 aa, Artificial Sequence
  Description of Artificial Sequence: Synthetic peptide
RTFDSYAMG

SEQ ID NO: 105 - protein, 9 aa, Artificial Sequence
  Description of Artificial Sequence: Synthetic peptide
FTFDNYAMG

SEQ ID NO: 106 - protein, 9 aa, Artificial Sequence
  Description of Artificial Sequence: Synthetic peptide
FTFSSYAMG

SEQ ID NO: 107 - protein, 9 aa, Artificial Sequence
  Description of Artificial Sequence: Synthetic peptide
STFDIYAMG

SEQ ID NO: 108 - protein, 9 aa, Artificial Sequence
  Description of Artificial Sequence: Synthetic peptide
STLSSYAMG

SEQ ID NO: 109 - protein, 9 aa, Artificial Sequence
  Description of Artificial Sequence: Synthetic peptide
FAFSSYWMG

SEQ ID NO: 110 - protein, 9 aa, Artificial Sequence
  Description of Artificial Sequence: Synthetic peptide
RTFGDYIMG

SEQ ID NO: 111 - protein, 9 aa, Artificial Sequence
  Description of Artificial Sequence: Synthetic peptide
NIFSRYIMG

SEQ ID NO: 112 - protein, 9 aa, Artificial Sequence
  Description of Artificial Sequence: Synthetic peptide
FTFSTHWMG

SEQ ID NO: 113 - protein, 9 aa, Artificial Sequence
  Description of Artificial Sequence: Synthetic peptide
GTFRNYGMG

SEQ ID NO: 114 - protein, 9 aa, Artificial Sequence
  Description of Artificial Sequence: Synthetic peptide
RFSRINSMG

SEQ ID NO: 115 - protein, 9 aa, Artificial Sequence
  Description of Artificial Sequence: Synthetic peptide
IPASIRTMG

SEQ ID NO: 116 - protein, 9 aa, Artificial Sequence
  Description of Artificial Sequence: Synthetic peptide
FTMSSSWMG

SEQ ID NO: 117 - protein, 9 aa, Artificial Sequence
  Description of Artificial Sequence: Synthetic peptide
PISGINRMG

SEQ ID NO: 118 - protein, 9 aa, Artificial Sequence
  Description of Artificial Sequence: Synthetic peptide
RTFSLSDMG

SEQ ID NO: 119 - protein, 9 aa, Artificial Sequence
  Description of Artificial Sequence: Synthetic peptide
SITSIRSMG

SEQ ID NO: 120 - protein, 9 aa, Artificial Sequence
  Description of Artificial Sequence: Synthetic peptide
RTFGDYIMG

SEQ ID NO: 121 - protein, 9 aa, Artificial Sequence
  Description of Artificial Sequence: Synthetic peptide
RTFSNYFMG

SEQ ID NO: 122 - protein, 9 aa, Artificial Sequence
  Description of Artificial Sequence: Synthetic peptide
PTFSIYDMG

SEQ ID NO: 123 - protein, 9 aa, Artificial Sequence
  Description of Artificial Sequence: Synthetic peptide
FTFSGNWMG

SEQ ID NO: 124 - protein, 9 aa, Artificial Sequence
  Description of Artificial Sequence: Synthetic peptide
FPFSEYPMG

SEQ ID NO: 125 - protein, 8 aa, Artificial Sequence
  Description of Artificial Sequence: Synthetic peptide
SIFNIGMG

SEQ ID NO: 126 - protein, 9 aa, Artificial Sequence
  Description of Artificial Sequence: Synthetic peptide
RAFSLRTMG

SEQ ID NO: 127 - protein, 10 aa, Artificial Sequence
  Description of Artificial Sequence: Synthetic peptide
RTFSSYAMMG

SEQ ID NO: 128 - protein, 9 aa, Artificial Sequence
  Description of Artificial Sequence: Synthetic peptide
PTFSIYDMG

SEQ ID NO: 129 - protein, 9 aa, Artificial Sequence
  Description of Artificial Sequence: Synthetic peptide
FTFSTSWMG

SEQ ID NO: 130 - protein, 9 aa, Artificial Sequence
  Description of Artificial Sequence: Synthetic peptide
FTLSGNWMG

SEQ ID NO: 131 - protein, 9 aa, Artificial Sequence
  Description of Artificial Sequence: Synthetic peptide
RAFRRYTMG

SEQ ID NO: 132 - protein, 9 aa, Artificial Sequence
  Description of Artificial Sequence: Synthetic peptide
NIFSRYIMG

SEQ ID NO: 133 - protein, 9 aa, Artificial Sequence
  Description of Artificial Sequence: Synthetic peptide
PTFSIYDMG

SEQ ID NO: 134 - protein, 7 aa, Artificial Sequence
  Description of Artificial Sequence: Synthetic peptide
RTYYAMG

SEQ ID NO: 135 - protein, 9 aa, Artificial Sequence
  Description of Artificial Sequence: Synthetic peptide
FTFSTSWMG

SEQ ID NO: 136 - protein, 9 aa, Artificial Sequence
  Description of Artificial Sequence: Synthetic peptide
RTFESYRMG

SEQ ID NO: 137 - protein, 9 aa, Artificial Sequence
  Description of Artificial Sequence: Synthetic peptide
SSLSFNAMG

SEQ ID NO: 138 - protein, 9 aa, Artificial Sequence
  Description of Artificial Sequence: Synthetic peptide
GTFSGRGMG

SEQ ID NO: 139 - protein, 9 aa, Artificial Sequence
  Description of Artificial Sequence: Synthetic peptide
PTFSWTMMG

SEQ ID NO: 140 - protein, 9 aa, Artificial Sequence
  Description of Artificial Sequence: Synthetic peptide
IIGTIRTMG

SEQ ID NO: 141 - protein, 9 aa, Artificial Sequence
  Description of Artificial Sequence: Synthetic peptide
FTLENNMMG

SEQ ID NO: 142 - protein, 9 aa, Artificial Sequence
  Description of Artificial Sequence: Synthetic peptide
NIFSRYIMG

SEQ ID NO: 143 - protein, 9 aa, Artificial Sequence
  Description of Artificial Sequence: Synthetic peptide
NIDRLYAMG

SEQ ID NO: 144 - protein, 9 aa, Artificial Sequence
  Description of Artificial Sequence: Synthetic peptide
SIASIHAIG

SEQ ID NO: 145 - protein, 9 aa, Artificial Sequence
  Description of Artificial Sequence: Synthetic peptide
RTFSSKAMG

SEQ ID NO: 146 - protein, 9 aa, Artificial Sequence
  Description of Artificial Sequence: Synthetic peptide
SIASFNAMG

SEQ ID NO: 147 - protein, 9 aa, Artificial Sequence
  Description of Artificial Sequence: Synthetic peptide
FTFSTSWMG

SEQ ID NO: 148 - protein, 9 aa, Artificial Sequence
  Description of Artificial Sequence: Synthetic peptide
FTFSGNWMG

SEQ ID NO: 149 - protein, 10 aa, Artificial Sequence
  Description of Artificial Sequence: Synthetic peptide
RTFSSYAMMG

SEQ ID NO: 150 - protein, 9 aa, Artificial Sequence
  Description of Artificial Sequence: Synthetic peptide
ITITTEVMG

SEQ ID NO: 151 - protein, 9 aa, Artificial Sequence
  Description of Artificial Sequence: Synthetic peptide
FTFSTSWMG

SEQ ID NO: 152 - protein, 9 aa, Artificial Sequence
  Description of Artificial Sequence: Synthetic peptide
VTLDLYAMG

SEQ ID NO: 153 - protein, 9 aa, Artificial Sequence
  Description of Artificial Sequence: Synthetic peptide
GTFSGGFMG

SEQ ID NO: 154 - protein, 10 aa, Artificial Sequence
  Description of Artificial Sequence: Synthetic peptide
RTFSTYASMW

SEQ ID NO: 155 - protein, 9 aa, Artificial Sequence
  Description of Artificial Sequence: Synthetic peptide
FTMSSSWMG

SEQ ID NO: 156 - protein, 9 aa, Artificial Sequence
  Description of Artificial Sequence: Synthetic peptide
FPVNRYSMG

SEQ ID NO: 157 - protein, 9 aa, Artificial Sequence
  Description of Artificial Sequence: Synthetic peptide
NIFSRYIMG

SEQ ID NO: 158 - protein, 9 aa, Artificial Sequence
  Description of Artificial Sequence: Synthetic peptide
RSFSNYVMG

SEQ ID NO: 159 - protein, 9 aa, Artificial Sequence
  Description of Artificial Sequence: Synthetic peptide
SIFSISDMG

SEQ ID NO: 160 - protein, 9 aa, Artificial Sequence
  Description of Artificial Sequence: Synthetic peptide
RTFSNYFMG

SEQ ID NO: 161 - protein, 9 aa, Artificial Sequence
  Description of Artificial Sequence: Synthetic peptide
LTFSNYVMG

SEQ ID NO: 162 - protein, 9 aa, Artificial Sequence
  Description of Artificial Sequence: Synthetic peptide
FTFRSFGMG

SEQ ID NO: 163 - protein, 9 aa, Artificial Sequence
  Description of Artificial Sequence: Synthetic peptide
NTFSGGFMG

SEQ ID NO: 164 - protein, 9 aa, Artificial Sequence
  Description of Artificial Sequence: Synthetic peptide
LTISTYPMG

SEQ ID NO: 165 - protein, 9 aa, Artificial Sequence
  Description of Artificial Sequence: Synthetic peptide
PTFSIYDMG

SEQ ID NO: 166 - protein, 9 aa, Artificial Sequence
  Description of Artificial Sequence: Synthetic peptide
FAFGDSWMG

SEQ ID NO: 167 - protein, 9 aa, Artificial Sequence
  Description of Artificial Sequence: Synthetic peptide
FTFDRSWMG

SEQ ID NO: 168 - protein, 9 aa, Artificial Sequence
  Description of Artificial Sequence: Synthetic peptide
RTFGDYIMG

SEQ ID NO: 169 - protein, 9 aa, Artificial Sequence
  Description of Artificial Sequence: Synthetic peptide
FTFSGNWMG

SEQ ID NO: 170 - protein, 9 aa, Artificial Sequence
  Description of Artificial Sequence: Synthetic peptide
FPVNRYWMG

SEQ ID NO: 171 - protein, 9 aa, Artificial Sequence
  Description of Artificial Sequence: Synthetic peptide
RTFGDYIMG

SEQ ID NO: 172 - protein, 9 aa, Artificial Sequence
  Description of Artificial Sequence: Synthetic peptide
FTFSTSWMG

SEQ ID NO: 173 - protein, 9 aa, Artificial Sequence
  Description of Artificial Sequence: Synthetic peptide
STFSINRMG

SEQ ID NO: 174 - protein, 9 aa, Artificial Sequence
  Description of Artificial Sequence: Synthetic peptide
FTFSTSWMG

SEQ ID NO: 175 - protein, 9 aa, Artificial Sequence
  Description of Artificial Sequence: Synthetic peptide
GTLSGNAMG

SEQ ID NO: 176 - protein, 9 aa, Artificial Sequence
  Description of Artificial Sequence: Synthetic peptide
HTFSSYGMG

SEQ ID NO: 177 - protein, 9 aa, Artificial Sequence
  Description of Artificial Sequence: Synthetic peptide
FTFSTSWMG

SEQ ID NO: 178 - protein, 9 aa, Artificial Sequence
  Description of Artificial Sequence: Synthetic peptide
FTFSRYWMG

SEQ ID NO: 179 - protein, 9 aa, Artificial Sequence
  Description of Artificial Sequence: Synthetic peptide
FTFDRSWMG

SEQ ID NO: 180 - protein, 9 aa, Artificial Sequence
  Description of Artificial Sequence: Synthetic peptide
YTFRAYVMG

SEQ ID NO: 181 - protein, 9 aa, Artificial Sequence
  Description of Artificial Sequence: Synthetic peptide
FTFSTYGMG

SEQ ID NO: 182 - protein, 9 aa, Artificial Sequence
  Description of Artificial Sequence: Synthetic peptide
FTFSTSWMG

SEQ ID NO: 183 - protein, 9 aa, Artificial Sequence
  Description of Artificial Sequence: Synthetic peptide
FTMSSSWMG

SEQ ID NO: 184 - protein, 9 aa, Artificial Sequence
  Description of Artificial Sequence: Synthetic peptide
FTFSGNWMG

SEQ ID NO: 185 - protein, 9 aa, Artificial Sequence
  Description of Artificial Sequence: Synthetic peptide
RTFGNYAMG

SEQ ID NO: 186 - protein, 9 aa, Artificial Sequence
  Description of Artificial Sequence: Synthetic peptide
FTFSGNWMG

SEQ ID NO: 187 - protein, 9 aa, Artificial Sequence
  Description of Artificial Sequence: Synthetic peptide
FTLSGNWMG

SEQ ID NO: 188 - protein, 9 aa, Artificial Sequence
  Description of Artificial Sequence: Synthetic peptide
RTFSTHAMG

SEQ ID NO: 189 - protein, 9 aa, Artificial Sequence
  Description of Artificial Sequence: Synthetic peptide
FTFSNSGMG

SEQ ID NO: 190 - protein, 6 aa, Artificial Sequence
  Description of Artificial Sequence: Synthetic peptide
RTFSMG

SEQ ID NO: 191 - protein, 9 aa, Artificial Sequence
  Description of Artificial Sequence: Synthetic peptide
NIFSRYIMG

SEQ ID NO: 192 - protein, 9 aa, Artificial Sequence
  Description of Artificial Sequence: Synthetic peptide
FTFDRSWMG

SEQ ID NO: 193 - protein, 9 aa, Artificial Sequence
  Description of Artificial Sequence: Synthetic peptide
FTFGHYAMG

SEQ ID NO: 194 - protein, 9 aa, Artificial Sequence
  Description of Artificial Sequence: Synthetic peptide
RTFSSYHMG

SEQ ID NO: 195 - protein, 5 aa, Artificial Sequence
  Description of Artificial Sequence: Synthetic peptide
RSRMG

SEQ ID NO: 196 - protein, 6 aa, Artificial Sequence
  Description of Artificial Sequence: Synthetic peptide
RTYNMG

SEQ ID NO: 197 - protein, 9 aa, Artificial Sequence
  Description of Artificial Sequence: Synthetic peptide
FTLSGNWMG

SEQ ID NO: 198 - protein, 9 aa, Artificial Sequence
  Description of Artificial Sequence: Synthetic peptide
FTFSTSWMG

SEQ ID NO: 199 - protein, 9 aa, Artificial Sequence
  Description of Artificial Sequence: Synthetic peptide
FTFSTSWMG

SEQ ID NO: 200 - protein, 7 aa, Artificial Sequence
  Description of Artificial Sequence: Synthetic peptide
RSRYGMG

SEQ ID NO: 201 - protein, 9 aa, Artificial Sequence
  Description of Artificial Sequence: Synthetic peptide
FTFSTSWMG

SEQ ID NO: 202 - protein, 9 aa, Artificial Sequence
  Description of Artificial Sequence: Synthetic peptide
FTFDRSWMG

SEQ ID NO: 203 - protein, 9 aa, Artificial Sequence
  Description of Artificial Sequence: Synthetic peptide
SIFSINSMG

SEQ ID NO: 204 - protein, 9 aa, Artificial Sequence
  Description of Artificial Sequence: Synthetic peptide
FTFDRSWMG

SEQ ID NO: 205 - protein, 9 aa, Artificial Sequence
  Description of Artificial Sequence: Synthetic peptide
FTFSTSWMG

SEQ ID NO: 206 - protein, 9 aa, Artificial Sequence
  Description of Artificial Sequence: Synthetic peptide
STLRDYVMG

SEQ ID NO: 207 - protein, 9 aa, Artificial Sequence
  Description of Artificial Sequence: Synthetic peptide
GTLSSYIMG

SEQ ID NO: 208 - protein, 9 aa, Artificial Sequence
  Description of Artificial Sequence: Synthetic peptide
FTFSTHWMG

SEQ ID NO: 209 - protein, 9 aa, Artificial Sequence
  Description of Artificial Sequence: Synthetic peptide
GTFSAFPMG

SEQ ID NO: 210 - protein, 9 aa, Artificial Sequence
  Description of Artificial Sequence: Synthetic peptide
FTFSGNWMG

SEQ ID NO: 211 - protein, 9 aa, Artificial Sequence
  Description of Artificial Sequence: Synthetic peptide
FTFSGNWMG

SEQ ID NO: 212 - protein, 9 aa, Artificial Sequence
  Description of Artificial Sequence: Synthetic peptide
FTFDRSWMG

SEQ ID NO: 213 - protein, 9 aa, Artificial Sequence
  Description of Artificial Sequence: Synthetic peptide
FTFSGNWMG

SEQ ID NO: 214 - protein, 9 aa, Artificial Sequence
  Description of Artificial Sequence: Synthetic peptide
FTLSSNWMG

SEQ ID NO: 215 - protein, 9 aa, Artificial Sequence
  Description of Artificial Sequence: Synthetic peptide
FDFSVSWMG

SEQ ID NO: 216 - protein, 9 aa, Artificial Sequence
  Description of Artificial Sequence: Synthetic peptide
FTMSSSWMG

SEQ ID NO: 217 - protein, 9 aa, Artificial Sequence
  Description of Artificial Sequence: Synthetic peptide
RNFRRNSMG

SEQ ID NO: 218 - protein, 9 aa, Artificial Sequence
  Description of Artificial Sequence: Synthetic peptide
FTFDRSWMG

SEQ ID NO: 219 - protein, 9 aa, Artificial Sequence
  Description of Artificial Sequence: Synthetic peptide
LTISTYNMG

SEQ ID NO: 220 - protein, 9 aa, Artificial Sequence
  Description of Artificial Sequence: Synthetic peptide
FTFSTSWMG

SEQ ID NO: 221 - protein, 9 aa, Artificial Sequence
  Description of Artificial Sequence: Synthetic peptide
RTFGDYIMG

SEQ ID NO: 222 - protein, 9 aa, Artificial Sequence
  Description of Artificial Sequence: Synthetic peptide
RIFRRNSMG

SEQ ID NO: 223 - protein, 9 aa, Artificial Sequence
  Description of Artificial Sequence: Synthetic peptide
FTFGNYGVA

SEQ ID NO: 224 - protein, 9 aa, Artificial Sequence
  Description of Artificial Sequence: Synthetic peptide
FTFDKYRMM

SEQ ID NO: 225 - protein, 9 aa, Artificial Sequence
  Description of Artificial Sequence: Synthetic peptide
FTFPSYTMG

SEQ ID NO: 226 - protein, 9 aa, Artificial Sequence
  Description of Artificial Sequence: Synthetic peptide
FTFSNYGVS

SEQ ID NO: 227 - protein, 9 aa, Artificial Sequence
  Description of Artificial Sequence: Synthetic peptide
FTFNNFSMT

SEQ ID NO: 228 - protein, 9 aa, Artificial Sequence
  Description of Artificial Sequence: Synthetic peptide
FTFSAYGMN

SEQ ID NO: 229 - protein, 9 aa, Artificial Sequence
  Description of Artificial Sequence: Synthetic peptide
FTFSDYTMN

SEQ ID NO: 230 - protein, 9 aa, Artificial Sequence
  Description of Artificial Sequence: Synthetic peptide
FTFNNYGMS

SEQ ID NO: 231 - protein, 9 aa, Artificial Sequence
  Description of Artificial Sequence: Synthetic peptide
FTFNKYPMM

SEQ ID NO: 232 - protein, 9 aa, Artificial Sequence
  Description of Artificial Sequence: Synthetic peptide
FTFNSYAMS

SEQ ID NO: 233 - protein, 9 aa, Artificial Sequence
  Description of Artificial Sequence: Synthetic peptide
FTFGNYKMT

SEQ ID NO: 234 - protein, 9 aa, Artificial Sequence
  Description of Artificial Sequence: Synthetic peptide
FTFTNYGVS

SEQ ID NO: 235 - protein, 9 aa, Artificial Sequence
  Description of Artificial Sequence: Synthetic peptide
FTFNKYPMM

SEQ ID NO: 236 - protein, 9 aa, Artificial Sequence
  Description of Artificial Sequence: Synthetic peptide
FTFADEGMM

SEQ ID NO: 237 - protein, 9 aa, Artificial Sequence
  Description of Artificial Sequence: Synthetic peptide
FTFSSAAMS

SEQ ID NO: 238 - protein, 9 aa, Artificial Sequence
  Description of Artificial Sequence: Synthetic peptide
FTFDRYRMM

SEQ ID NO: 239 - protein, 9 aa, Artificial Sequence
  Description of Artificial Sequence: Synthetic peptide
FTFAEYSMN

SEQ ID NO: 240 - protein, 9 aa, Artificial Sequence
  Description of Artificial Sequence: Synthetic peptide
FTFGTIPMS

SEQ ID NO: 241 - protein, 9 aa, Artificial Sequence
  Description of Artificial Sequence: Synthetic peptide
FTFLYYRMA

SEQ ID NO: 242 - protein, 9 aa, Artificial Sequence
  Description of Artificial Sequence: Synthetic peptide
FTFTNYGVS

SEQ ID NO: 243 - protein, 9 aa, Artificial Sequence
  Description of Artificial Sequence: Synthetic peptide
FTFSNYGVS

SEQ ID NO: 244 - protein, 9 aa, Artificial Sequence
  Description of Artificial Sequence: Synthetic peptide
FTFEGYPMS

SEQ ID NO: 245 - protein, 9 aa, Artificial Sequence
  Description of Artificial Sequence: Synthetic peptide
FTFSRYFMG

SEQ ID NO: 246 - protein, 9 aa, Artificial Sequence
  Description of Artificial Sequence: Synthetic peptide
FTFNNYGVS

SEQ ID NO: 247 - protein, 9 aa, Artificial Sequence
  Description of Artificial Sequence: Synthetic peptide
FTFGTIPMS

SEQ ID NO: 248 - protein, 9 aa, Artificial Sequence
  Description of Artificial Sequence: Synthetic peptide
FTFGNYRMT

SEQ ID NO: 249 - protein, 9 aa, Artificial Sequence
  Description of Artificial Sequence: Synthetic peptide
FTFVWYGMG

SEQ ID NO: 250 - protein, 9 aa, Artificial Sequence
  Description of Artificial Sequence: Synthetic peptide
FTFSTYAMS

SEQ ID NO: 251 - protein, 9 aa, Artificial Sequence
  Description of Artificial Sequence: Synthetic peptide
FTFSYYRMY

SEQ ID NO: 252 - protein, 9 aa, Artificial Sequence
  Description of Artificial Sequence: Synthetic peptide
FTFKSYGMH

SEQ ID NO: 253 - protein, 9 aa, Artificial Sequence
  Description of Artificial Sequence: Synthetic peptide
FTFVAYNMG

SEQ ID NO: 254 - protein, 9 aa, Artificial Sequence
  Description of Artificial Sequence: Synthetic peptide
FTFEQYDMR

SEQ ID NO: 255 - protein, 9 aa, Artificial Sequence
  Description of Artificial Sequence: Synthetic peptide
FTFNKYPMM

SEQ ID NO: 256 - protein, 9 aa, Artificial Sequence
  Description of Artificial Sequence: Synthetic peptide
FTFSVYSMN

SEQ ID NO: 257 - protein, 9 aa, Artificial Sequence
  Description of Artificial Sequence: Synthetic peptide
FTFNAYPMT

SEQ ID NO: 258 - protein, 9 aa, Artificial Sequence
  Description of Artificial Sequence: Synthetic peptide
FTFSNYGMT

SEQ ID NO: 259 - protein, 9 aa, Artificial Sequence
  Description of Artificial Sequence: Synthetic peptide
FTFPVYNMA

SEQ ID NO: 260 - protein, 9 aa, Artificial Sequence
  Description of Artificial Sequence: Synthetic peptide
FTFSPYLVS

SEQ ID NO: 261 - protein, 9 aa, Artificial Sequence
  Description of Artificial Sequence: Synthetic peptide
FTFKSYVMG

SEQ ID NO: 262 - protein, 9 aa, Artificial Sequence
  Description of Artificial Sequence: Synthetic peptide
FTFSRYAMN

SEQ ID NO: 263 - protein, 9 aa, Artificial Sequence
  Description of Artificial Sequence: Synthetic peptide
FTFNKYPMM

SEQ ID NO: 264 - protein, 9 aa, Artificial Sequence
  Description of Artificial Sequence: Synthetic peptide
FTFNHYGMG

SEQ ID NO: 265 - protein, 9 aa, Artificial Sequence
  Description of Artificial Sequence: Synthetic peptide
FTFYDYTMD

SEQ ID NO: 266 - protein, 9 aa, Artificial Sequence
  Description of Artificial Sequence: Synthetic peptide
FTFGNYAMA

SEQ ID NO: 267 - protein, 9 aa, Artificial Sequence
  Description of Artificial Sequence: Synthetic peptide
FTFRRYVMG

SEQ ID NO: 268 - protein, 9 aa, Artificial Sequence
  Description of Artificial Sequence: Synthetic peptide
FTFSSYFMS

SEQ ID NO: 269 - protein, 9 aa, Artificial Sequence
  Description of Artificial Sequence: Synthetic peptide
FMFSWYDMG

SEQ ID NO: 270 - protein, 9 aa, Artificial Sequence
  Description of Artificial Sequence: Synthetic peptide
FTFTNYGMS

SEQ ID NO: 271 - protein, 9 aa, Artificial Sequence
  Description of Artificial Sequence: Synthetic peptide
FTFPNYGMS

SEQ ID NO: 272 - protein, 9 aa, Artificial Sequence
  Description of Artificial Sequence: Synthetic peptide
FTFPNYGMA

SEQ ID NO: 273 - protein, 9 aa, Artificial Sequence
  Description of Artificial Sequence: Synthetic peptide
FTFHKYGMA

SEQ ID NO: 274 - protein, 9 aa, Artificial Sequence
  Description of Artificial Sequence: Synthetic peptide
FTFSRYHMG

SEQ ID NO: 275 - protein, 9 aa, Artificial Sequence
  Description of Artificial Sequence: Synthetic peptide
STFTEYRMW

SEQ ID NO: 276 - protein, 9 aa, Artificial Sequence
  Description of Artificial Sequence: Synthetic peptide
FTFEDTEMD

SEQ ID NO: 277 - protein, 9 aa, Artificial Sequence
  Description of Artificial Sequence: Synthetic peptide
FTFGSSAMS

SEQ ID NO: 278 - protein, 9 aa, Artificial Sequence
  Description of Artificial Sequence: Synthetic peptide
FTFSTAAMT

SEQ ID NO: 279 - protein, 9 aa, Artificial Sequence
  Description of Artificial Sequence: Synthetic peptide
LTFPNYGMG

SEQ ID NO: 280 - protein, 9 aa, Artificial Sequence
  Description of Artificial Sequence: Synthetic peptide
FTFLWYDMG

SEQ ID NO: 281 - protein, 9 aa, Artificial Sequence
  Description of Artificial Sequence: Synthetic peptide
FTFSPYLMA

SEQ ID NO: 282 - protein, 9 aa, Artificial Sequence
  Description of Artificial Sequence: Synthetic peptide
FTFSDYTMN

SEQ ID NO: 283 - protein, 9 aa, Artificial Sequence
  Description of Artificial Sequence: Synthetic peptide
FTFSNYGVS

SEQ ID NO: 284 - protein, 9 aa, Artificial Sequence
  Description of Artificial Sequence: Synthetic peptide
FTFYKYLMS

SEQ ID NO: 285 - protein, 9 aa, Artificial Sequence
  Description of Artificial Sequence: Synthetic peptide
FTFSAYPMY

SEQ ID NO: 286 - protein, 9 aa, Artificial Sequence
  Description of Artificial Sequence: Synthetic peptide
FTLADYTMN

SEQ ID NO: 287 - protein, 9 aa, Artificial Sequence
  Description of Artificial Sequence: Synthetic peptide
FTFSYYGMY

SEQ ID NO: 288 - protein, 9 aa, Artificial Sequence
  Description of Artificial Sequence: Synthetic peptide
FTFVWYDMG

SEQ ID NO: 289 - protein, 9 aa, Artificial Sequence
  Description of Artificial Sequence: Synthetic peptide
FTFNKYPMM

SEQ ID NO: 290 - protein, 9 aa, Artificial Sequence
  Description of Artificial Sequence: Synthetic peptide
FTFSSASMS

SEQ ID NO: 291 - protein, 9 aa, Artificial Sequence
  Description of Artificial Sequence: Synthetic peptide
FTFGNYRMT

SEQ ID NO: 292 - protein, 9 aa, Artificial Sequence
  Description of Artificial Sequence: Synthetic peptide
FTFSSYFMS

SEQ ID NO: 293 - protein, 9 aa, Artificial Sequence
  Description of Artificial Sequence: Synthetic peptide
FTFSTAAMS

SEQ ID NO: 294 - protein, 9 aa, Artificial Sequence
  Description of Artificial Sequence: Synthetic peptide
FTFRSYTMG

SEQ ID NO: 295 - protein, 9 aa, Artificial Sequence
  Description of Artificial Sequence: Synthetic peptide
FTFGTYYMG

SEQ ID NO: 296 - protein, 9 aa, Artificial Sequence
  Description of Artificial Sequence: Synthetic peptide
FTFSSYVMI

SEQ ID NO: 297 - protein, 9 aa, Artificial Sequence
  Description of Artificial Sequence: Synthetic peptide
FTFGTIPMS

SEQ ID NO: 298 - protein, 9 aa, Artificial Sequence
  Description of Artificial Sequence: Synthetic peptide
FTFSYYRVY

SEQ ID NO: 299 - protein, 9 aa, Artificial Sequence
  Description of Artificial Sequence: Synthetic peptide
FTFGNYAMA

SEQ ID NO: 300 - protein, 9 aa, Artificial Sequence
  Description of Artificial Sequence: Synthetic peptide
FTFTNYGVS

SEQ ID NO: 301 - protein, 9 aa, Artificial Sequence
  Description of Artificial Sequence: Synthetic peptide
FTFSNYGVS

SEQ ID NO: 302 - protein, 9 aa, Artificial Sequence
  Description of Artificial Sequence: Synthetic peptide
FAFAAYDMG

SEQ ID NO: 303 - protein, 9 aa, Artificial Sequence
  Description of Artificial Sequence: Synthetic peptide
FTLSSYPMS

SEQ ID NO: 304 - protein, 9 aa, Artificial Sequence
  Description of Artificial Sequence: Synthetic peptide
FTFTYYRMD

SEQ ID NO: 305 - protein, 9 aa, Artificial Sequence
  Description of Artificial Sequence: Synthetic peptide
FTFADEGMM

SEQ ID NO: 306 - protein, 9 aa, Artificial Sequence
  Description of Artificial Sequence: Synthetic peptide
FTFKDYGVN

SEQ ID NO: 307 - protein, 9 aa, Artificial Sequence
  Description of Artificial Sequence: Synthetic peptide
FTFSRYAMT

SEQ ID NO: 308 - protein, 9 aa, Artificial Sequence
  Description of Artificial Sequence: Synthetic peptide
FTFSSYFMS

SEQ ID NO: 309 - protein, 9 aa, Artificial Sequence
  Description of Artificial Sequence: Synthetic peptide
FTFNKYPMM

SEQ ID NO: 310 - protein, 9 aa, Artificial Sequence
  Description of Artificial Sequence: Synthetic peptide
FTFSNYGMS

SEQ ID NO: 311 - protein, 9 aa, Artificial Sequence
  Description of Artificial Sequence: Synthetic peptide
FTFSNYGVS

SEQ ID NO: 312 - protein, 9 aa, Artificial Sequence
  Description of Artificial Sequence: Synthetic peptide
FIFSSAAMS

SEQ ID NO: 313 - protein, 9 aa, Artificial Sequence
  Description of Artificial Sequence: Synthetic peptide
FTFSYYRMY

SEQ ID NO: 314 - protein, 9 aa, Artificial Sequence
  Description of Artificial Sequence: Synthetic peptide
FTFSRYFMG

SEQ ID NO: 315 - protein, 9 aa, Artificial Sequence
  Description of Artificial Sequence: Synthetic peptide
FTFSRYFMG

SEQ ID NO: 316 - protein, 9 aa, Artificial Sequence
  Description of Artificial Sequence: Synthetic peptide
FTFSYYRMY

SEQ ID NO: 317 - protein, 9 aa, Artificial Sequence
  Description of Artificial Sequence: Synthetic peptide
FTFPKYGMA

SEQ ID NO: 318 - protein, 9 aa, Artificial Sequence
  Description of Artificial Sequence: Synthetic peptide
FTFKDYGMN

SEQ ID NO: 319 - protein, 9 aa, Artificial Sequence
  Description of Artificial Sequence: Synthetic peptide
FTFNAYPMT

SEQ ID NO: 320 - protein, 9 aa, Artificial Sequence
  Description of Artificial Sequence: Synthetic peptide
FTFETYAMS

SEQ ID NO: 321 - protein, 9 aa, Artificial Sequence
  Description of Artificial Sequence: Synthetic peptide
FTFSPYPMM

SEQ ID NO: 322 - protein, 9 aa, Artificial Sequence
  Description of Artificial Sequence: Synthetic peptide
FTFSTYPVS

SEQ ID NO: 323 - protein, 9 aa, Artificial Sequence
  Description of Artificial Sequence: Synthetic peptide
FTFGNYAMS

SEQ ID NO: 324 - protein, 9 aa, Artificial Sequence
  Description of Artificial Sequence: Synthetic peptide
FTFTYYRMY

SEQ ID NO: 325 - protein, 9 aa, Artificial Sequence
  Description of Artificial Sequence: Synthetic peptide
FTFTSYDMG

SEQ ID NO: 326 - protein, 9 aa, Artificial Sequence
  Description of Artificial Sequence: Synthetic peptide
FTFSPRRMS

SEQ ID NO: 327 - protein, 9 aa, Artificial Sequence
  Description of Artificial Sequence: Synthetic peptide
FTFGNYRMT

SEQ ID NO: 328 - protein, 9 aa, Artificial Sequence
  Description of Artificial Sequence: Synthetic peptide
FTFGNYGMT

SEQ ID NO: 329 - protein, 9 aa, Artificial Sequence
  Description of Artificial Sequence: Synthetic peptide
FTFSPYPMM

SEQ ID NO: 330 - protein, 9 aa, Artificial Sequence
  Description of Artificial Sequence: Synthetic peptide
FTFSSYFVT

SEQ ID NO: 331 - protein, 9 aa, Artificial Sequence
  Description of Artificial Sequence: Synthetic peptide
FTFSDYTMN

SEQ ID NO: 332 - protein, 9 aa, Artificial Sequence
  Description of Artificial Sequence: Synthetic peptide
FTFFPYAMG

SEQ ID NO: 333 - protein, 9 aa, Artificial Sequence
  Description of Artificial Sequence: Synthetic peptide
FTFVWYDMG

SEQ ID NO: 334 - protein, 9 aa, Artificial Sequence
  Description of Artificial Sequence: Synthetic peptide
FTFSSYFMT

SEQ ID NO: 335 - protein, 9 aa, Artificial Sequence
  Description of Artificial Sequence: Synthetic peptide
LIFAWYDMG

SEQ ID NO: 336 - protein, 9 aa, Artificial Sequence
  Description of Artificial Sequence: Synthetic peptide
FTFEGYPMS

SEQ ID NO: 337 - protein, 9 aa, Artificial Sequence
  Description of Artificial Sequence: Synthetic peptide
FTFSNYGVS

SEQ ID NO: 338 - protein, 9 aa, Artificial Sequence
  Description of Artificial Sequence: Synthetic peptide
FTFSRYFMG

SEQ ID NO: 339 - protein, 9 aa, Artificial Sequence
  Description of Artificial Sequence: Synthetic peptide
GIFSSYAIS

SEQ ID NO: 340 - protein, 9 aa, Artificial Sequence
  Description of Artificial Sequence: Synthetic peptide
GTYTTHGIS

SEQ ID NO: 341 - protein, 9 aa, Artificial Sequence
  Description of Artificial Sequence: Synthetic peptide
FSFGSYAMS

SEQ ID NO: 342 - protein, 9 aa, Artificial Sequence
  Description of Artificial Sequence: Synthetic peptide
GPFNKYAIS

SEQ ID NO: 343 - protein, 9 aa, Artificial Sequence
  Description of Artificial Sequence: Synthetic peptide
FTFSTYLMI

SEQ ID NO: 344 - protein, 9 aa, Artificial Sequence
  Description of Artificial Sequence: Synthetic peptide
FTLSSYSMS

SEQ ID NO: 345 - protein, 9 aa, Artificial Sequence
  Description of Artificial Sequence: Synthetic peptide
FTFGNYAMS

SEQ ID NO: 346 - protein, 9 aa, Artificial Sequence
  Description of Artificial Sequence: Synthetic peptide
FTFGTYSMS

SEQ ID NO: 347 - protein, 9 aa, Artificial Sequence
  Description of Artificial Sequence: Synthetic peptide
FSFSNHAMS

SEQ ID NO: 348 - protein, 9 aa, Artificial Sequence
  Description of Artificial Sequence: Synthetic peptide
FSFSSSGMS

SEQ ID NO: 349 - protein, 9 aa, Artificial Sequence
  Description of Artificial Sequence: Synthetic peptide
GTFRRHAIS

SEQ ID NO: 350 - protein, 9 aa, Artificial Sequence
  Description of Artificial Sequence: Synthetic peptide
GTYTTHGIS

SEQ ID NO: 351 - protein, 9 aa, Artificial Sequence
  Description of Artificial Sequence: Synthetic peptide
FTFSNYAMS

SEQ ID NO: 352 - protein, 9 aa, Artificial Sequence
  Description of Artificial Sequence: Synthetic peptide
FTFSNYAMS

SEQ ID NO: 353 - protein, 9 aa, Artificial Sequence
  Description of Artificial Sequence: Synthetic peptide
GTFNIYAIS

SEQ ID NO: 354 - protein, 9 aa, Artificial Sequence
  Description of Artificial Sequence: Synthetic peptide
GTFSRYGIS

SEQ ID NO: 355 - protein, 9 aa, Artificial Sequence
  Description of Artificial Sequence: Synthetic peptide
GTFTNHAIS

SEQ ID NO: 356 - protein, 9 aa, Artificial Sequence
  Description of Artificial Sequence: Synthetic peptide
FTFASYAMS

SEQ ID NO: 357 - protein, 9 aa, Artificial Sequence
  Description of Artificial Sequence: Synthetic peptide
GTFTYYPIS

SEQ ID NO: 358 - protein, 9 aa, Artificial Sequence
  Description of Artificial Sequence: Synthetic peptide
GTYTTHGIS

SEQ ID NO: 359 - protein, 9 aa, Artificial Sequence
  Description of Artificial Sequence: Synthetic peptide
GTFSQYAIS

SEQ ID NO: 360 - protein, 13 aa, Artificial Sequence
  Description of Artificial Sequence: Synthetic peptide
AAITWSGTRTDYA

SEQ ID NO: 361 - protein, 13 aa, Artificial Sequence
  Description of Artificial Sequence: Synthetic peptide
STISWSGGRTYYA

SEQ ID NO: 362 - protein, 13 aa, Artificial Sequence
  Description of Artificial Sequence: Synthetic peptide
AAITWSGTRTDYA

SEQ ID NO: 363 - protein, 13 aa, Artificial Sequence
  Description of Artificial Sequence: Synthetic peptide
STISSDGDSTYYA

SEQ ID NO: 364 - protein, 13 aa, Artificial Sequence
  Description of Artificial Sequence: Synthetic peptide
ATISSSGDRTYYA

SEQ ID NO: 365 - protein, 13 aa, Artificial Sequence
  Description of Artificial Sequence: Synthetic peptide
ATINSSGSRTYYA

SEQ ID NO: 366 - protein, 13 aa, Artificial Sequence
  Description of Artificial Sequence: Synthetic peptide
ATISRGGTRTNYA

SEQ ID NO: 367 - protein, 13 aa, Artificial Sequence
  Description of Artificial Sequence: Synthetic peptide
ATISGGGDTTYYA

SEQ ID NO: 368 - protein, 13 aa, Artificial Sequence
  Description of Artificial Sequence: Synthetic peptide
SSITWSGGRTSYA

SEQ ID NO: 369 - protein, 13 aa, Artificial Sequence
  Description of Artificial Sequence: Synthetic peptide
SGISGSGGRTSYA

SEQ ID NO: 370 - protein, 13 aa, Artificial Sequence
  Description of Artificial Sequence: Synthetic peptide
ASITWGGGRTYYA

SEQ ID NO: 371 - protein, 13 aa, Artificial Sequence
  Description of Artificial Sequence: Synthetic peptide
AAITWSGTRTNYA

SEQ ID NO: 372 - protein, 13 aa, Artificial Sequence
  Description of Artificial Sequence: Synthetic peptide
AAITWSGGRTYYA

SEQ ID NO: 373 - protein, 13 aa, Artificial Sequence
  Description of Artificial Sequence: Synthetic peptide
SAISWSGTNTNYA

SEQ ID NO: 374 - protein, 13 aa, Artificial Sequence
  Description of Artificial Sequence: Synthetic peptide
ATISGSGGRTYYA

SEQ ID NO: 375 - protein, 13 aa, Artificial Sequence
  Description of Artificial Sequence: Synthetic peptide
ATISWGGNSTYYA

SEQ ID NO: 376 - protein, 13 aa, Artificial Sequence
  Description of Artificial Sequence: Synthetic peptide
ATISSGGGSTYYA

SEQ ID NO: 377 - protein, 13 aa, Artificial Sequence
  Description of Artificial Sequence: Synthetic peptide
SAINSSGSRTYYA

SEQ ID NO: 378 - protein, 13 aa, Artificial Sequence
  Description of Artificial Sequence: Synthetic peptide
ATISGSFGRTYYA

SEQ ID NO: 379 - protein, 13 aa, Artificial Sequence
  Description of Artificial Sequence: Synthetic peptide
ASISWSGDTTNYA

SEQ ID NO: 380 - protein, 13 aa, Artificial Sequence
  Description of Artificial Sequence: Synthetic peptide
SAITWSSSRTYYA

SEQ ID NO: 381 - protein, 13 aa, Artificial Sequence
  Description of Artificial Sequence: Synthetic peptide
STISRSSTRTYYA

SEQ ID NO: 382 - protein, 13 aa, Artificial Sequence
  Description of Artificial Sequence: Synthetic peptide
ASISSGDTNTNYA

SEQ ID NO: 383 - protein, 13 aa, Artificial Sequence
  Description of Artificial Sequence: Synthetic peptide
SAISTGDGSTNYA

SEQ ID NO: 384 - protein, 13 aa, Artificial Sequence
  Description of Artificial Sequence: Synthetic peptide
AAITWSGGRTYYA

SEQ ID NO: 385 - protein, 13 aa, Artificial Sequence
  Description of Artificial Sequence: Synthetic peptide
ATITWSGTRTNYA

SEQ ID NO: 386 - protein, 13 aa, Artificial Sequence
  Description of Artificial Sequence: Synthetic peptide
AAISWGGASTNYA

SEQ ID NO: 387 - protein, 13 aa, Artificial Sequence
  Description of Artificial Sequence: Synthetic peptide
AAISWGGSNTNYA

SEQ ID NO: 388 - protein, 13 aa, Artificial Sequence
  Description of Artificial Sequence: Synthetic peptide
AAITWSGTRTDYA

SEQ ID NO: 389 - protein, 13 aa, Artificial Sequence
  Description of Artificial Sequence: Synthetic peptide
AAITWSGTRTDYA

SEQ ID NO: 390 - protein, 13 aa, Artificial Sequence
  Description of Artificial Sequence: Synthetic peptide
STISWSGGNTYYA

SEQ ID NO: 391 - protein, 13 aa, Artificial Sequence
  Description of Artificial Sequence: Synthetic peptide
AAITTSGSSTYYA

SEQ ID NO: 392 - protein, 13 aa, Artificial Sequence
  Description of Artificial Sequence: Synthetic peptide
SAITRSGITTYYA

SEQ ID NO: 393 - protein, 13 aa, Artificial Sequence
  Description of Artificial Sequence: Synthetic peptide
SSISSSSSRTSYA

SEQ ID NO: 394 - protein, 13 aa, Artificial Sequence
  Description of Artificial Sequence: Synthetic peptide
ATINSSGSRTYYA

SEQ ID NO: 395 - protein, 13 aa, Artificial Sequence
  Description of Artificial Sequence: Synthetic peptide
ASITWSGTSTNYA

SEQ ID NO: 396 - protein, 13 aa, Artificial Sequence
  Description of Artificial Sequence: Synthetic peptide
AGISWSGTRTYYA

SEQ ID NO: 397 - protein, 13 aa, Artificial Sequence
  Description of Artificial Sequence: Synthetic peptide
SAISRNGASTSYA

SEQ ID NO: 398 - protein, 13 aa, Artificial Sequence
  Description of Artificial Sequence: Synthetic peptide
ATISGGGDTTYYA

SEQ ID NO: 399 - protein, 13 aa, Artificial Sequence
  Description of Artificial Sequence: Synthetic peptide
ATITWSGTRTNYA

SEQ ID NO: 400 - protein, 13 aa, Artificial Sequence
  Description of Artificial Sequence: Synthetic peptide
TAITTSGGNTYYA

SEQ ID NO: 401 - protein, 13 aa, Artificial Sequence
  Description of Artificial Sequence: Synthetic peptide
ATISTSSSRTYYA

SEQ ID NO: 402 - protein, 13 aa, Artificial Sequence
  Description of Artificial Sequence: Synthetic peptide
SAISWSGSSTYYA

SEQ ID NO: 403 - protein, 13 aa, Artificial Sequence
  Description of Artificial Sequence: Synthetic peptide
ATITWSGTTTNYA

SEQ ID NO: 404 - protein, 13 aa, Artificial Sequence
  Description of Artificial Sequence: Synthetic peptide
ASITWSGTRTDYA

SEQ ID NO: 405 - protein, 13 aa, Artificial Sequence
  Description of Artificial Sequence: Synthetic peptide
ASISSGDTNTYYA

SEQ ID NO: 406 - protein, 13 aa, Artificial Sequence
  Description of Artificial Sequence: Synthetic peptide
AAITGSGGRTYYA

SEQ ID NO: 407 - protein, 12 aa, Artificial Sequence
  Description of Artificial Sequence: Synthetic peptide
AARNSGGNTNYA

SEQ ID NO: 408 - protein, 12 aa, Artificial Sequence
  Description of Artificial Sequence: Synthetic peptide
ATISGGGSTNYA

SEQ ID NO: 409 - protein, 12 aa, Artificial Sequence
  Description of Artificial Sequence: Synthetic peptide
AGISNGGTTKYA

SEQ ID NO: 410 - protein, 12 aa, Artificial Sequence
  Description of Artificial Sequence: Synthetic peptide
AARNSGGNTNYA

SEQ ID NO: 411 - protein, 13 aa, Artificial Sequence
  Description of Artificial Sequence: Synthetic peptide
AAISWSGVSTIYA

SEQ ID NO: 412 - protein, 15 aa, Artificial Sequence
  Description of Artificial Sequence: Synthetic peptide
AHIFRSGITSYASYA

SEQ ID NO: 413 - protein, 13 aa, Artificial Sequence
  Description of Artificial Sequence: Synthetic peptide
SLITSDDGSTYYA

SEQ ID NO: 414 - protein, 12 aa, Artificial Sequence
  Description of Artificial Sequence: Synthetic peptide
ATLTSGGSTNYA

SEQ ID NO: 415 - protein, 13 aa, Artificial Sequence
  Description of Artificial Sequence: Synthetic peptide
STITFNGDHTYYA

SEQ ID NO: 416 - protein, 13 aa, Artificial Sequence
  Description of Artificial Sequence: Synthetic peptide
GAINWLSESTYYA

SEQ ID NO: 417 - protein, 13 aa, Artificial Sequence
  Description of Artificial Sequence: Synthetic peptide
SSVYIFGGSTYYA

SEQ ID NO: 418 - protein, 12 aa, Artificial Sequence
  Description of Artificial Sequence: Synthetic peptide
ASVSGGGNSDYA

SEQ ID NO: 419 - protein, 13 aa, Artificial Sequence
  Description of Artificial Sequence: Synthetic peptide
AAINWDSARTYYA

SEQ ID NO: 420 - protein, 13 aa, Artificial Sequence
  Description of Artificial Sequence: Synthetic peptide
AAITWNSGRTNYA

SEQ ID NO: 421 - protein, 13 aa, Artificial Sequence
  Description of Artificial Sequence: Synthetic peptide
SGISSGGGRTYYA

SEQ ID NO: 422 - protein, 13 aa, Artificial Sequence
  Description of Artificial Sequence: Synthetic peptide
AVVNWNGDSTYYA

SEQ ID NO: 423 - protein, 12 aa, Artificial Sequence
  Description of Artificial Sequence: Synthetic peptide
SSIYSNGHTYYA

SEQ ID NO: 424 - protein, 13 aa, Artificial Sequence
  Description of Artificial Sequence: Synthetic peptide
SLITSDDGSTYYA

SEQ ID NO: 425 - protein, 12 aa, Artificial Sequence
  Description of Artificial Sequence: Synthetic peptide
AIITDGSKTLYA

SEQ ID NO: 426 - protein, 13 aa, Artificial Sequence
  Description of Artificial Sequence: Synthetic peptide
AVINWSRGSTFYA

SEQ ID NO: 427 - protein, 12 aa, Artificial Sequence
  Description of Artificial Sequence: Synthetic peptide
ATINSGGGTNYA

SEQ ID NO: 428 - protein, 13 aa, Artificial Sequence
  Description of Artificial Sequence: Synthetic peptide
ASISSSGVSKHYA

SEQ ID NO: 429 - protein, 13 aa, Artificial Sequence
  Description of Artificial Sequence: Synthetic peptide
AAIRWSGGTTFYA

SEQ ID NO: 430 - protein, 12 aa, Artificial Sequence
  Description of Artificial Sequence: Synthetic peptide
AGISNGGTTKYA

SEQ ID NO: 431 - protein, 13 aa, Artificial Sequence
  Description of Artificial Sequence: Synthetic peptide
ASTIWSRGDTYYA

SEQ ID NO: 432 - protein, 12 aa, Artificial Sequence
  Description of Artificial Sequence: Synthetic peptide
AIITDGSKTLYA

SEQ ID NO: 433 - protein, 12 aa, Artificial Sequence
  Description of Artificial Sequence: Synthetic peptide
AGILSDGRELYA

SEQ ID NO: 434 - protein, 12 aa, Artificial Sequence
  Description of Artificial Sequence: Synthetic peptide
GGINWSGRTYYA

SEQ ID NO: 435 - protein, 13 aa, Artificial Sequence
  Description of Artificial Sequence: Synthetic peptide
SSVYIFGGSTYYA

SEQ ID NO: 436 - protein, 13 aa, Artificial Sequence
  Description of Artificial Sequence: Synthetic peptide
SSVYIFGGSTYYA

SEQ ID NO: 437 - protein, 12 aa, Artificial Sequence
  Description of Artificial Sequence: Synthetic peptide
AIITDGSKTLYA

SEQ ID NO: 438 - protein, 13 aa, Artificial Sequence
  Description of Artificial Sequence: Synthetic peptide
SLITSDDGSTYYA

SEQ ID NO: 439 - protein, 13 aa, Artificial Sequence
  Description of Artificial Sequence: Synthetic peptide
SAIGWSGASTYYA

SEQ ID NO: 440 - protein, 12 aa, Artificial Sequence
  Description of Artificial Sequence: Synthetic peptide
AGISSGGTTKYA

SEQ ID NO: 441 - protein, 13 aa, Artificial Sequence
  Description of Artificial Sequence: Synthetic peptide
SLITSDDGSTYYA

SEQ ID NO: 442 - protein, 13 aa, Artificial Sequence
  Description of Artificial Sequence: Synthetic peptide
SSVYIFGGSTYYA

SEQ ID NO: 443 - protein, 13 aa, Artificial Sequence
  Description of Artificial Sequence: Synthetic peptide
SSVYIFGGSTYYA

SEQ ID NO: 444 - protein, 13 aa, Artificial Sequence
  Description of Artificial Sequence: Synthetic peptide
SSVYIFGGSTYYA

SEQ ID NO: 445 - protein, 12 aa, Artificial Sequence
  Description of Artificial Sequence: Synthetic peptide
VGISSGGSTHYA

SEQ ID NO: 446 - protein, 12 aa, Artificial Sequence
  Description of Artificial Sequence: Synthetic peptide
VGISSGGSTHYA

SEQ ID NO: 447 - protein, 12 aa, Artificial Sequence
  Description of Artificial Sequence: Synthetic peptide
AIITDGSKTLYA

SEQ ID NO: 448 - protein, 13 aa, Artificial Sequence
  Description of Artificial Sequence: Synthetic peptide
AAIHWNGDSTAYA

SEQ ID NO: 449 - protein, 12 aa, Artificial Sequence
  Description of Artificial Sequence: Synthetic peptide
AARNSGGNTNYA

SEQ ID NO: 450 - protein, 13 aa, Artificial Sequence
  Description of Artificial Sequence: Synthetic peptide
AGIWRSGGSTVYA

SEQ ID NO: 451 - protein, 12 aa, Artificial Sequence
  Description of Artificial Sequence: Synthetic peptide
ASVLRGGYTWYA

SEQ ID NO: 452 - protein, 12 aa, Artificial Sequence
  Description of Artificial Sequence: Synthetic peptide
AIITDGSKTLYA

SEQ ID NO: 453 - protein, 12 aa, Artificial Sequence
  Description of Artificial Sequence: Synthetic peptide
VGISSGGSTHYA

SEQ ID NO: 454 - protein, 13 aa, Artificial Sequence
  Description of Artificial Sequence: Synthetic peptide
SAIGWSGASTYYA

SEQ ID NO: 455 - protein, 12 aa, Artificial Sequence
  Description of Artificial Sequence: Synthetic peptide
AGISNGGTTKYA

SEQ ID NO: 456 - protein, 12 aa, Artificial Sequence
  Description of Artificial Sequence: Synthetic peptide
ATITSGGLTVYA

SEQ ID NO: 457 - protein, 13 aa, Artificial Sequence
  Description of Artificial Sequence: Synthetic peptide
GAINWLSESTYYA

SEQ ID NO: 458 - protein, 13 aa, Artificial Sequence
  Description of Artificial Sequence: Synthetic peptide
ATVTWRDNITYYA

SEQ ID NO: 459 - protein, 13 aa, Artificial Sequence
  Description of Artificial Sequence: Synthetic peptide
AAINWDSARTYYA

SEQ ID NO: 460 - protein, 13 aa, Artificial Sequence
  Description of Artificial Sequence: Synthetic peptide
ASTIWSRGDTYYA

SEQ ID NO: 461 - protein, 12 aa, Artificial Sequence
  Description of Artificial Sequence: Synthetic peptide
ASVLRGGYTWYA

SEQ ID NO: 462 - protein, 13 aa, Artificial Sequence
  Description of Artificial Sequence: Synthetic peptide
AAVNWSGRRELYA

SEQ ID NO: 463 - protein, 13 aa, Artificial Sequence
  Description of Artificial Sequence: Synthetic peptide
AAITWNSGRIGYA

SEQ ID NO: 464 - protein, 13 aa, Artificial Sequence
  Description of Artificial Sequence: Synthetic peptide
SGISSGGGRTYYA

SEQ ID NO: 465 - protein, 12 aa, Artificial Sequence
  Description of Artificial Sequence: Synthetic peptide
ASITSGGSTYYA

SEQ ID NO: 466 - protein, 12 aa, Artificial Sequence
  Description of Artificial Sequence: Synthetic peptide
AEITRSGRTNYA

SEQ ID NO: 467 - protein, 13 aa, Artificial Sequence
  Description of Artificial Sequence: Synthetic peptide
ASISSSGISTYYA

SEQ ID NO: 468 - protein, 12 aa, Artificial Sequence
  Description of Artificial Sequence: Synthetic peptide
ATITSGGSTNYA

SEQ ID NO: 469 - protein, 12 aa, Artificial Sequence
  Description of Artificial Sequence: Synthetic peptide
ATISRGGGSTYV

SEQ ID NO: 470 - protein, 12 aa, Artificial Sequence
  Description of Artificial Sequence: Synthetic peptide
ASITSGGSTYYA

SEQ ID NO: 471 - protein, 17 aa, Artificial Sequence
  Description of Artificial Sequence: Synthetic peptide
ATIVHSGGHSGGTSYYA

SEQ ID NO: 472 - protein, 12 aa, Artificial Sequence
  Description of Artificial Sequence: Synthetic peptide
AARNSGGNTNYA

SEQ ID NO: 473 - protein, 13 aa, Artificial Sequence
  Description of Artificial Sequence: Synthetic peptide
ASIYWSSGNTYYA

SEQ ID NO: 474 - protein, 13 aa, Artificial Sequence
  Description of Artificial Sequence: Synthetic peptide
AAISWSGISTIYA

SEQ ID NO: 475 - protein, 12 aa, Artificial Sequence
  Description of Artificial Sequence: Synthetic peptide
ASISTSGNTFYA

SEQ ID NO: 476 - protein, 12 aa, Artificial Sequence
  Description of Artificial Sequence: Synthetic peptide
ASITSGGSTYYA

SEQ ID NO: 477 - protein, 12 aa, Artificial Sequence
  Description of Artificial Sequence: Synthetic peptide
ASITSGGTTNYA

SEQ ID NO: 478 - protein, 13 aa, Artificial Sequence
  Description of Artificial Sequence: Synthetic peptide
AVINYRGSSLKYA

SEQ ID NO: 479 - protein, 13 aa, Artificial Sequence
  Description of Artificial Sequence: Synthetic peptide
AAISWSGVSKHYA

SEQ ID NO: 480 - protein, 12 aa, Artificial Sequence
  Description of Artificial Sequence: Synthetic peptide
VSVTSGGYTNYA

SEQ ID NO: 481 - protein, 12 aa, Artificial Sequence
  Description of Artificial Sequence: Synthetic peptide
ASINSGGTRNYA

SEQ ID NO: 482 - protein, 12 aa, Artificial Sequence
  Description of Artificial Sequence: Synthetic peptide
ASISSGSAINYA

SEQ ID NO: 483 - protein, 13 aa, Artificial Sequence
  Description of Artificial Sequence: Synthetic peptide
ADIRSSAGRTYYA

SEQ ID NO: 484 - protein, 12 aa, Artificial Sequence
  Description of Artificial Sequence: Synthetic peptide
AGILSDGRELYA

SEQ ID NO: 485 - protein, 13 aa, Artificial Sequence
  Description of Artificial Sequence: Synthetic peptide
ASISSSGISTYYA

SEQ ID NO: 486 - protein, 16 aa, Artificial Sequence
  Description of Artificial Sequence: Synthetic peptide
AAITPINWGGRGTHYA

SEQ ID NO: 487 - protein, 13 aa, Artificial Sequence
  Description of Artificial Sequence: Synthetic peptide
ASIYWSSGNTYYA

SEQ ID NO: 488 - protein, 13 aa, Artificial Sequence
  Description of Artificial Sequence: Synthetic peptide
ATVRWGTSSTYYA

SEQ ID NO: 489 - protein, 12 aa, Artificial Sequence
  Description of Artificial Sequence: Synthetic peptide
AGISNGGTTKYA

SEQ ID NO: 490 - protein, 12 aa, Artificial Sequence
  Description of Artificial Sequence: Synthetic peptide
AAITSGGSTYYA

SEQ ID NO: 491 - protein, 13 aa, Artificial Sequence
  Description of Artificial Sequence: Synthetic peptide
AAISWSGVSTYYA

SEQ ID NO: 492 - protein, 12 aa, Artificial Sequence
  Description of Artificial Sequence: Synthetic peptide
ALISRVGVTSYA

SEQ ID NO: 493 - protein, 12 aa, Artificial Sequence
  Description of Artificial Sequence: Synthetic peptide
ATISWSGSAVYA

SEQ ID NO: 494 - protein, 15 aa, Artificial Sequence
  Description of Artificial Sequence: Synthetic peptide
ATIYSRSGGSTTYYA

SEQ ID NO: 495 - protein, 12 aa, Artificial Sequence
  Description of Artificial Sequence: Synthetic peptide
ASISSGGGTNYA

SEQ ID NO: 496 - protein, 12 aa, Artificial Sequence
  Description of Artificial Sequence: Synthetic peptide
AAMTSGGGTNYA

SEQ ID NO: 497 - protein, 12 aa, Artificial Sequence
  Description of Artificial Sequence: Synthetic peptide
ASITSGGSTNYA

SEQ ID NO: 498 - protein, 13 aa, Artificial Sequence
  Description of Artificial Sequence: Synthetic peptide
SAISWSGISTYYA

SEQ ID NO: 499 - protein, 12 aa, Artificial Sequence
  Description of Artificial Sequence: Synthetic peptide
ASITSGGTTNYA

SEQ ID NO: 500 - protein, 12 aa, Artificial Sequence
  Description of Artificial Sequence: Synthetic peptide
ASVTSGGTTNYA

SEQ ID NO: 501 - protein, 13 aa, Artificial Sequence
  Description of Artificial Sequence: Synthetic peptide
AALSWIIGSTYYA

SEQ ID NO: 502 - protein, 12 aa, Artificial Sequence
  Description of Artificial Sequence: Synthetic peptide
ASITSGGSTSYA

SEQ ID NO: 503 - protein, 12 aa, Artificial Sequence
  Description of Artificial Sequence: Synthetic peptide
AGVNSNGYINYA

SEQ ID NO: 504 - protein, 12 aa, Artificial Sequence
  Description of Artificial Sequence: Synthetic peptide
SSISRSGTTMFA

SEQ ID NO: 505 - protein, 14 aa, Artificial Sequence
  Description of Artificial Sequence: Synthetic peptide
AAISGWSGGTTNYA

SEQ ID NO: 506 - protein, 12 aa, Artificial Sequence
  Description of Artificial Sequence: Synthetic peptide
ASIGSSGTTRYA

SEQ ID NO: 507 - protein, 12 aa, Artificial Sequence
  Description of Artificial Sequence: Synthetic peptide
AAISSGGTTYYA

SEQ ID NO: 508 - protein, 12 aa, Artificial Sequence
  Description of Artificial Sequence: Synthetic peptide
ASISSGGTTNYA

SEQ ID NO: 509 - protein, 12 aa, Artificial Sequence
  Description of Artificial Sequence: Synthetic peptide
AGVNSNGYINYA

SEQ ID NO: 510 - protein, 12 aa, Artificial Sequence
  Description of Artificial Sequence: Synthetic peptide
ASITSGGTTSYA

SEQ ID NO: 511 - protein, 12 aa, Artificial Sequence
  Description of Artificial Sequence: Synthetic peptide
VGISSGGTPHYA

SEQ ID NO: 512 - protein, 12 aa, Artificial Sequence
  Description of Artificial Sequence: Synthetic peptide
AGVNSNGYINYA

SEQ ID NO: 513 - protein, 13 aa, Artificial Sequence
  Description of Artificial Sequence: Synthetic peptide
ARISSGGELPYYA

SEQ ID NO: 514 - protein, 12 aa, Artificial Sequence
  Description of Artificial Sequence: Synthetic peptide
GGISSGGSTYYA

SEQ ID NO: 515 - protein, 15 aa, Artificial Sequence
  Description of Artificial Sequence: Synthetic peptide
AVITRSGGGEVTTYA

SEQ ID NO: 516 - protein, 12 aa, Artificial Sequence
  Description of Artificial Sequence: Synthetic peptide
AGITSSGIPNYA

SEQ ID NO: 517 - protein, 13 aa, Artificial Sequence
  Description of Artificial Sequence: Synthetic peptide
SAIGWSGASTYYA

SEQ ID NO: 518 - protein, 12 aa, Artificial Sequence
  Description of Artificial Sequence: Synthetic peptide
AAVTSGGNTNYA

SEQ ID NO: 519 - protein, 12 aa, Artificial Sequence
  Description of Artificial Sequence: Synthetic peptide
AEITRVGNTNYA

SEQ ID NO: 520 - protein, 15 aa, Artificial Sequence
  Description of Artificial Sequence: Synthetic peptide
AVITRSGGGEVTTYA

SEQ ID NO: 521 - protein, 13 aa, Artificial Sequence
  Description of Artificial Sequence: Synthetic peptide
SYICRAGGPTYYA

SEQ ID NO: 522 - protein, 12 aa, Artificial Sequence
  Description of Artificial Sequence: Synthetic peptide
GVIWGGGGTYYA

SEQ ID NO: 523 - protein, 13 aa, Artificial Sequence
  Description of Artificial Sequence: Synthetic peptide
STIWPRGHKTYYA

SEQ ID NO: 524 - protein, 12 aa, Artificial Sequence
  Description of Artificial Sequence: Synthetic peptide
SGISSGGDTYYV

SEQ ID NO: 525 - protein, 13 aa, Artificial Sequence
  Description of Artificial Sequence: Synthetic peptide
SSISPSGGWTEYA

SEQ ID NO: 526 - protein, 13 aa, Artificial Sequence
  Description of Artificial Sequence: Synthetic peptide
SGISPNGGITTYA

SEQ ID NO: 527 - protein, 13 aa, Artificial Sequence
  Description of Artificial Sequence: Synthetic peptide
SSIDWHGGVTYYA

SEQ ID NO: 528 - protein, 12 aa, Artificial Sequence
  Description of Artificial Sequence: Synthetic peptide
TGISSGGDTYYV

SEQ ID NO: 529 - protein, 12 aa, Artificial Sequence
  Description of Artificial Sequence: Synthetic peptide
SGITRSGSTNYR

SEQ ID NO: 530 - protein, 13 aa, Artificial Sequence
  Description of Artificial Sequence: Synthetic peptide
SGIVSSGGLTGYA

SEQ ID NO: 531 - protein, 13 aa, Artificial Sequence
  Description of Artificial Sequence: Synthetic peptide
SQISQTGRITYYA

SEQ ID NO: 532 - protein, 12 aa, Artificial Sequence
  Description of Artificial Sequence: Synthetic peptide
SGISSGGDTYYV

SEQ ID NO: 533 - protein, 13 aa, Artificial Sequence
  Description of Artificial Sequence: Synthetic peptide
SYISSSGSSTYYA

SEQ ID NO: 534 - protein, 13 aa, Artificial Sequence
  Description of Artificial Sequence: Synthetic peptide
SSIGRHGGRTYYA

SEQ ID NO: 535 - protein, 13 aa, Artificial Sequence
  Description of Artificial Sequence: Synthetic peptide
SGISPSGGITTYA

SEQ ID NO: 536 - protein, 13 aa, Artificial Sequence
  Description of Artificial Sequence: Synthetic peptide
SAISGSGDKTYYA

SEQ ID NO: 537 - protein, 13 aa, Artificial Sequence
  Description of Artificial Sequence: Synthetic peptide
SWISPHGALTYYA

SEQ ID NO: 538 - protein, 12 aa, Artificial Sequence
  Description of Artificial Sequence: Synthetic peptide
GVIWGGGGTYYA

SEQ ID NO: 539 - protein, 13 aa, Artificial Sequence
  Description of Artificial Sequence: Synthetic peptide
TAISRSGDKTYYA

SEQ ID NO: 540 - protein, 13 aa, Artificial Sequence
  Description of Artificial Sequence: Synthetic peptide
GYINPSGGYTYYA

SEQ ID NO: 541 - protein, 13 aa, Artificial Sequence
  Description of Artificial Sequence: Synthetic peptide
GYINPSRGYTYYA

SEQ ID NO: 542 - protein, 13 aa, Artificial Sequence
  Description of Artificial Sequence: Synthetic peptide
SSISGYGSTTYYA

SEQ ID NO: 543 - protein, 13 aa, Artificial Sequence
  Description of Artificial Sequence: Synthetic peptide
SSISSTGFKTYYA

SEQ ID NO: 544 - protein, 13 aa, Artificial Sequence
  Description of Artificial Sequence: Synthetic peptide
TWISPHGALTYYA

SEQ ID NO: 545 - protein, 13 aa, Artificial Sequence
  Description of Artificial Sequence: Synthetic peptide
SVIHQSGTPTYYA

SEQ ID NO: 546 - protein, 13 aa, Artificial Sequence
  Description of Artificial Sequence: Synthetic peptide
SQISETGRRTYYA

SEQ ID NO: 547 - protein, 13 aa, Artificial Sequence
  Description of Artificial Sequence: Synthetic peptide
SAISGRGDNSYYA

SEQ ID NO: 548 - protein, 13 aa, Artificial Sequence
  Description of Artificial Sequence: Synthetic peptide
SEISPSGGYTYYA

SEQ ID NO: 549 - protein, 13 aa, Artificial Sequence
  Description of Artificial Sequence: Synthetic peptide
SGISPSGGITTYA

SEQ ID NO: 550 - protein, 13 aa, Artificial Sequence
  Description of Artificial Sequence: Synthetic peptide
SAISGSGGGTSYA

SEQ ID NO: 551 - protein, 13 aa, Artificial Sequence
  Description of Artificial Sequence: Synthetic peptide
SAISREGRATYYA

SEQ ID NO: 552 - protein, 13 aa, Artificial Sequence
  Description of Artificial Sequence: Synthetic peptide
SYITPKGDHTYYA

SEQ ID NO: 553 - protein, 13 aa, Artificial Sequence
  Description of Artificial Sequence: Synthetic peptide
SAISGSGGGTSYA

SEQ ID NO: 554 - protein, 13 aa, Artificial Sequence
  Description of Artificial Sequence: Synthetic peptide
SGISPSGGITTYA

SEQ ID NO: 555 - protein, 13 aa, Artificial Sequence
  Description of Artificial Sequence: Synthetic peptide
SAITGSGGSTYYA

SEQ ID NO: 556 - protein, 12 aa, Artificial Sequence
  Description of Artificial Sequence: Synthetic peptide
GVIWGGGGTYYA

SEQ ID NO: 557 - protein, 13 aa, Artificial Sequence
  Description of Artificial Sequence: Synthetic peptide
SSISGYGSTTYYA

SEQ ID NO: 558 - protein, 13 aa, Artificial Sequence
  Description of Artificial Sequence: Synthetic peptide
SSISDHGFNTYYA

SEQ ID NO: 559 - protein, 13 aa, Artificial Sequence
  Description of Artificial Sequence: Synthetic peptide
SAINGSGGGTYYA

SEQ ID NO: 560 - protein, 13 aa, Artificial Sequence
  Description of Artificial Sequence: Synthetic peptide
SEISPSGKKKYYA

SEQ ID NO: 561 - protein, 13 aa, Artificial Sequence
  Description of Artificial Sequence: Synthetic peptide
SSIVSSGGLTLYA

SEQ ID NO: 562 - protein, 13 aa, Artificial Sequence
  Description of Artificial Sequence: Synthetic peptide
SYISSSGSSTYYA

SEQ ID NO: 563 - protein, 13 aa, Artificial Sequence
  Description of Artificial Sequence: Synthetic peptide
SAISGSGGGTSYA

SEQ ID NO: 564 - protein, 13 aa, Artificial Sequence
  Description of Artificial Sequence: Synthetic peptide
SSIGRHGGRTYYA

SEQ ID NO: 565 - protein, 13 aa, Artificial Sequence
  Description of Artificial Sequence: Synthetic peptide
SEISPSGGYTYYA

SEQ ID NO: 566 - protein, 13 aa, Artificial Sequence
  Description of Artificial Sequence: Synthetic peptide
TTIGPNGTTTYYA

SEQ ID NO: 567 - protein, 13 aa, Artificial Sequence
  Description of Artificial Sequence: Synthetic peptide
SQISNTGDRRYYA

SEQ ID NO: 568 - protein, 13 aa, Artificial Sequence
  Description of Artificial Sequence: Synthetic peptide
CGIYPNGGSTYYA

SEQ ID NO: 569 - protein, 13 aa, Artificial Sequence
  Description of Artificial Sequence: Synthetic peptide
GYINPTGGYTYYA

SEQ ID NO: 570 - protein, 13 aa, Artificial Sequence
  Description of Artificial Sequence: Synthetic peptide
SGIYPSGGSTLYA

SEQ ID NO: 571 - protein, 13 aa, Artificial Sequence
  Description of Artificial Sequence: Synthetic peptide
STISSGGGYTYYP

SEQ ID NO: 572 - protein, 13 aa, Artificial Sequence
  Description of Artificial Sequence: Synthetic peptide
STISPYGPVTYYA

SEQ ID NO: 573 - protein, 13 aa, Artificial Sequence
  Description of Artificial Sequence: Synthetic peptide
SGISPSGGITTYA

SEQ ID NO: 574 - protein, 13 aa, Artificial Sequence
  Description of Artificial Sequence: Synthetic peptide
SKIGPHGRLTYYA

SEQ ID NO: 575 - protein, 13 aa, Artificial Sequence
  Description of Artificial Sequence: Synthetic peptide
SAISGGGSNKYYA

SEQ ID NO: 576 - protein, 13 aa, Artificial Sequence
  Description of Artificial Sequence: Synthetic peptide
SGISPTGGITTYA

SEQ ID NO: 577 - protein, 13 aa, Artificial Sequence
  Description of Artificial Sequence: Synthetic peptide
SAISREGRATYYA

SEQ ID NO: 578 - protein, 13 aa, Artificial Sequence
  Description of Artificial Sequence: Synthetic peptide
SAISGRGDNTYYA

SEQ ID NO: 579 - protein, 13 aa, Artificial Sequence
  Description of Artificial Sequence: Synthetic peptide
SSISAPGFTTYYA

SEQ ID NO: 580 - protein, 13 aa, Artificial Sequence
  Description of Artificial Sequence: Synthetic peptide
SGISPSGGITYYA

SEQ ID NO: 581 - protein, 13 aa, Artificial Sequence
  Description of Artificial Sequence: Synthetic peptide
SYINPSGGYTYYA

SEQ ID NO: 582 - protein, 13 aa, Artificial Sequence
  Description of Artificial Sequence: Synthetic peptide
SAISGNGGSTFYA

SEQ ID NO: 583 - protein, 13 aa, Artificial Sequence
  Description of Artificial Sequence: Synthetic peptide
SSITSTGDQTYYA

SEQ ID NO: 584 - protein, 13 aa, Artificial Sequence
  Description of Artificial Sequence: Synthetic peptide
TWITPSGGLTYYA

SEQ ID NO: 585 - protein, 13 aa, Artificial Sequence
  Description of Artificial Sequence: Synthetic peptide
SPITNAGDRPYYA

SEQ ID NO: 586 - protein, 13 aa, Artificial Sequence
  Description of Artificial Sequence: Synthetic peptide
SSIPSSGFNTYYA

SEQ ID NO: 587 - protein, 13 aa, Artificial Sequence
  Description of Artificial Sequence: Synthetic peptide
SAITGSGGGTSYA

SEQ ID NO: 588 - protein, 13 aa, Artificial Sequence
  Description of Artificial Sequence: Synthetic peptide
SGISPTGGITTYA

SEQ ID NO: 589 - protein, 12 aa, Artificial Sequence
  Description of Artificial Sequence: Synthetic peptide
GVIWGGGGTYYA

SEQ ID NO: 590 - protein, 12 aa, Artificial Sequence
  Description of Artificial Sequence: Synthetic peptide
GVIWGGGGTYYA

SEQ ID NO: 591 - protein, 13 aa, Artificial Sequence
  Description of Artificial Sequence: Synthetic peptide
SAISPRGGITTYA

SEQ ID NO: 592 - protein, 13 aa, Artificial Sequence
  Description of Artificial Sequence: Synthetic peptide
SSIWPRGQKTYYA

SEQ ID NO: 593 - protein, 13 aa, Artificial Sequence
  Description of Artificial Sequence: Synthetic peptide
SSISSSGGYTGYA

SEQ ID NO: 594 - protein, 13 aa, Artificial Sequence
  Description of Artificial Sequence: Synthetic peptide
SGINRTGGVTSYA

SEQ ID NO: 595 - protein, 13 aa, Artificial Sequence
  Description of Artificial Sequence: Synthetic peptide
SSIGPHGGKTYYA

SEQ ID NO: 596 - protein, 13 aa, Artificial Sequence
  Description of Artificial Sequence: Synthetic peptide
SGISPSGGITTYA

SEQ ID NO: 597 - protein, 13 aa, Artificial Sequence
  Description of Artificial Sequence: Synthetic peptide
SSIWPSGGQTWYA

SEQ ID NO: 598 - protein, 13 aa, Artificial Sequence
  Description of Artificial Sequence: Synthetic peptide
GYINPNGGYTYYA

SEQ ID NO: 599 - protein, 13 aa, Artificial Sequence
  Description of Artificial Sequence: Synthetic peptide
SYISHGGGDTYYA

SEQ ID NO: 600 - protein, 13 aa, Artificial Sequence
  Description of Artificial Sequence: Synthetic peptide
SYITPKGDHTYYA

SEQ ID NO: 601 - protein, 13 aa, Artificial Sequence
  Description of Artificial Sequence: Synthetic peptide
SAITREGRATYYA

SEQ ID NO: 602 - protein, 13 aa, Artificial Sequence
  Description of Artificial Sequence: Synthetic peptide
SIITPSGGITYYA

SEQ ID NO: 603 - protein, 13 aa, Artificial Sequence
  Description of Artificial Sequence: Synthetic peptide
SLIPHTGNPTYYA

SEQ ID NO: 604 - protein, 12 aa, Artificial Sequence
  Description of Artificial Sequence: Synthetic peptide
RVIWGGGDTYYV

SEQ ID NO: 605 - protein, 12 aa, Artificial Sequence
  Description of Artificial Sequence: Synthetic peptide
GVIWGGGNTTYY

SEQ ID NO: 606 - protein, 12 aa, Artificial Sequence
  Description of Artificial Sequence: Synthetic peptide
GVIWGGGGTYYA

SEQ ID NO: 607 - protein, 13 aa, Artificial Sequence
  Description of Artificial Sequence: Synthetic peptide
STISHGGEHTYYA

SEQ ID NO: 608 - protein, 13 aa, Artificial Sequence
  Description of Artificial Sequence: Synthetic peptide
SSIVSSGGLTLYA

SEQ ID NO: 609 - protein, 13 aa, Artificial Sequence
  Description of Artificial Sequence: Synthetic peptide
GYINPSRGNTYYA

SEQ ID NO: 610 - protein, 13 aa, Artificial Sequence
  Description of Artificial Sequence: Synthetic peptide
SAISGRGDNTYYA

SEQ ID NO: 611 - protein, 13 aa, Artificial Sequence
  Description of Artificial Sequence: Synthetic peptide
SAITGTGGETYYA

SEQ ID NO: 612 - protein, 13 aa, Artificial Sequence
  Description of Artificial Sequence: Synthetic peptide
TSISSTGFNTYYA

SEQ ID NO: 613 - protein, 13 aa, Artificial Sequence
  Description of Artificial Sequence: Synthetic peptide
SEISPSGKKKYYA

SEQ ID NO: 614 - protein, 13 aa, Artificial Sequence
  Description of Artificial Sequence: Synthetic peptide
SGISPTGCITYYA

SEQ ID NO: 615 - protein, 13 aa, Artificial Sequence
  Description of Artificial Sequence: Synthetic peptide
STISSGGGYTYYP

SEQ ID NO: 616 - protein, 13 aa, Artificial Sequence
  Description of Artificial Sequence: Synthetic peptide
SEISPSGGYTYYA

SEQ ID NO: 617 - protein, 13 aa, Artificial Sequence
  Description of Artificial Sequence: Synthetic peptide
SAITGSGGSTYYA

SEQ ID NO: 618 - protein, 13 aa, Artificial Sequence
  Description of Artificial Sequence: Synthetic peptide
SVISGSGGRPNYA

SEQ ID NO: 619 - protein, 13 aa, Artificial Sequence
  Description of Artificial Sequence: Synthetic peptide
SAITGTGGETYYA

SEQ ID NO: 620 - protein, 12 aa, Artificial Sequence
  Description of Artificial Sequence: Synthetic peptide
SGISSGGDTYYV

SEQ ID NO: 621 - protein, 13 aa, Artificial Sequence
  Description of Artificial Sequence: Synthetic peptide
SGISPSGGHTWYA

SEQ ID NO: 622 - protein, 13 aa, Artificial Sequence
  Description of Artificial Sequence: Synthetic peptide
SGISPSGGITTYA

SEQ ID NO: 623 - protein, 13 aa, Artificial Sequence
  Description of Artificial Sequence: Synthetic peptide
SAIVSSGSLTLYA

SEQ ID NO: 624 - protein, 13 aa, Artificial Sequence
  Description of Artificial Sequence: Synthetic peptide
SGISPSGGITTYA

SEQ ID NO: 625 - protein, 13 aa, Artificial Sequence
  Description of Artificial Sequence: Synthetic peptide
SSINRHGWVTYYA

SEQ ID NO: 626 - protein, 13 aa, Artificial Sequence
  Description of Artificial Sequence: Synthetic peptide
SYINRNGGITYYA

SEQ ID NO: 627 - protein, 13 aa, Artificial Sequence
  Description of Artificial Sequence: Synthetic peptide
SAIIGTGSNTYYA

SEQ ID NO: 628 - protein, 12 aa, Artificial Sequence
  Description of Artificial Sequence: Synthetic peptide
GVIWGGGDTYYV

SEQ ID NO: 629 - protein, 13 aa, Artificial Sequence
  Description of Artificial Sequence: Synthetic peptide
SGISPSGGITTYA

SEQ ID NO: 630 - protein, 13 aa, Artificial Sequence
  Description of Artificial Sequence: Synthetic peptide
SSIDDRGRYTYYA

SEQ ID NO: 631 - protein, 13 aa, Artificial Sequence
  Description of Artificial Sequence: Synthetic peptide
SAISGRGDNTYYA

SEQ ID NO: 632 - protein, 13 aa, Artificial Sequence
  Description of Artificial Sequence: Synthetic peptide
SSISSTGCNTYYA

SEQ ID NO: 633 - protein, 13 aa, Artificial Sequence
  Description of Artificial Sequence: Synthetic peptide
STIGSSGYPTYYA

SEQ ID NO: 634 - protein, 13 aa, Artificial Sequence
  Description of Artificial Sequence: Synthetic peptide
STISSGGGYTYYP

SEQ ID NO: 635 - protein, 13 aa, Artificial Sequence
  Description of Artificial Sequence: Synthetic peptide
GYINPSGGYTYYA

SEQ ID NO: 636 - protein, 13 aa, Artificial Sequence
  Description of Artificial Sequence: Synthetic peptide
SAISGSGGNTYYA

SEQ ID NO: 637 - protein, 9 aa, Artificial Sequence
  Description of Artificial Sequence: Synthetic peptide
GGIIPTNYA

SEQ ID NO: 638 - protein, 9 aa, Artificial Sequence
  Description of Artificial Sequence: Synthetic peptide
GGIIPINYA

SEQ ID NO: 639 - protein, 9 aa, Artificial Sequence
  Description of Artificial Sequence: Synthetic peptide
SAITGSYYA

SEQ ID NO: 640 - protein, 9 aa, Artificial Sequence
  Description of Artificial Sequence: Synthetic peptide
GGIIPMNYA

SEQ ID NO: 641 - protein, 9 aa, Artificial Sequence
  Description of Artificial Sequence: Synthetic peptide
SAISGSYYA

SEQ ID NO: 642 - protein, 9 aa, Artificial Sequence
  Description of Artificial Sequence: Synthetic peptide
SAINPSYYA

SEQ ID NO: 643 - protein, 9 aa, Artificial Sequence
  Description of Artificial Sequence: Synthetic peptide
SAITGSYYA

SEQ ID NO: 644 - protein, 9 aa, Artificial Sequence
  Description of Artificial Sequence: Synthetic peptide
SAITGSYYA

SEQ ID NO: 645 - protein, 9 aa, Artificial Sequence
  Description of Artificial Sequence: Synthetic peptide
SAISGSYYA

SEQ ID NO: 646 - protein, 9 aa, Artificial Sequence
  Description of Artificial Sequence: Synthetic peptide
SAISGSYYA

SEQ ID NO: 647 - protein, 9 aa, Artificial Sequence
  Description of Artificial Sequence: Synthetic peptide
GGIIPMNYA

SEQ ID NO: 648 - protein, 9 aa, Artificial Sequence
  Description of Artificial Sequence: Synthetic peptide
GGIIPINYA

SEQ ID NO: 649 - protein, 9 aa, Artificial Sequence
  Description of Artificial Sequence: Synthetic peptide
SAISGGYYA

SEQ ID NO: 650 - protein, 9 aa, Artificial Sequence
  Description of Artificial Sequence: Synthetic peptide
SAISGNYYA

SEQ ID NO: 651 - protein, 9 aa, Artificial Sequence
  Description of Artificial Sequence: Synthetic peptide
GGIIPINYA

SEQ ID NO: 652 - protein, 9 aa, Artificial Sequence
  Description of Artificial Sequence: Synthetic peptide
GGIIPINYA

SEQ ID NO: 653 - protein, 9 aa, Artificial Sequence
  Description of Artificial Sequence: Synthetic peptide
GGINPLNYA

SEQ ID NO: 654 - protein, 9 aa, Artificial Sequence
  Description of Artificial Sequence: Synthetic peptide
SAITNSYYA

SEQ ID NO: 655 - protein, 9 aa, Artificial Sequence
  Description of Artificial Sequence: Synthetic peptide
GGIIPFNYA

SEQ ID NO: 656 - protein, 9 aa, Artificial Sequence
  Description of Artificial Sequence: Synthetic peptide
GGIIPINYA

SEQ ID NO: 657 - protein, 9 aa, Artificial Sequence
  Description of Artificial Sequence: Synthetic peptide
GGIIPMNYA

SEQ ID NO: 658 - protein, 14 aa, Artificial Sequence
  Description of Artificial Sequence: Synthetic peptide
CAAAAWTIYEYDYW

SEQ ID NO: 659 - protein, 13 aa, Artificial Sequence
  Description of Artificial Sequence: Synthetic peptide
CAARPVYRTYGSW

SEQ ID NO: 660 - protein, 14 aa, Artificial Sequence
  Description of Artificial Sequence: Synthetic peptide
CAAAAWRYSEYDYW

SEQ ID NO: 661 - protein, 12 aa, Artificial Sequence
  Description of Artificial Sequence: Synthetic peptide
CAAGTRRGRNYW

SEQ ID NO: 662 - protein, 13 aa, Artificial Sequence
  Description of Artificial Sequence: Synthetic peptide
CAARRYGRRYDYW

SEQ ID NO: 663 - protein, 13 aa, Artificial Sequence
  Description of Artificial Sequence: Synthetic peptide
CAARPNYRDYEYW

SEQ ID NO: 664 - protein, 14 aa, Artificial Sequence
  Description of Artificial Sequence: Synthetic peptide
CAAAAWTIYAYNYW

SEQ ID NO: 665 - protein, 15 aa, Artificial Sequence
  Description of Artificial Sequence: Synthetic peptide
CAAVPWRWTTRRDYW

SEQ ID NO: 666 - protein, 14 aa, Artificial Sequence
  Description of Artificial Sequence: Synthetic peptide
CAANAWTIYRYDYW

SEQ ID NO: 667 - protein, 19 aa, Artificial Sequence
  Description of Artificial Sequence: Synthetic peptide
CAANLWYPVDRLNTGFNYW

SEQ ID NO: 668 - protein, 17 aa, Artificial Sequence
  Description of Artificial Sequence: Synthetic peptide
CATRLWGTWTAGDYDYW

SEQ ID NO: 669 - protein, 14 aa, Artificial Sequence
  Description of Artificial Sequence: Synthetic peptide
CAAAAWTIYTYDSW

SEQ ID NO: 670 - protein, 14 aa, Artificial Sequence
  Description of Artificial Sequence: Synthetic peptide
CAAAAWTIYEYDYW

SEQ ID NO: 671 - protein, 13 aa, Artificial Sequence
  Description of Artificial Sequence: Synthetic peptide
CATRALRDGRGYW

SEQ ID NO: 672 - protein, 14 aa, Artificial Sequence
  Description of Artificial Sequence: Synthetic peptide
CAAAAWTIYEFDSW

SEQ ID NO: 673 - protein, 13 aa, Artificial Sequence
  Description of Artificial Sequence: Synthetic peptide
CAARPRFRTYGYW

SEQ ID NO: 674 - protein, 12 aa, Artificial Sequence
  Description of Artificial Sequence: Synthetic peptide
CAAGSVYGRNYW

SEQ ID NO: 675 - protein, 17 aa, Artificial Sequence
  Description of Artificial Sequence: Synthetic peptide
CAARLWGTWTAGDYDYW

SEQ ID NO: 676 - protein, 14 aa, Artificial Sequence
  Description of Artificial Sequence: Synthetic peptide
CAAGAWTIYEYDYW

SEQ ID NO: 677 - protein, 12 aa, Artificial Sequence
  Description of Artificial Sequence: Synthetic peptide
CAAGSVYGRNSW

SEQ ID NO: 678 - protein, 14 aa, Artificial Sequence
  Description of Artificial Sequence: Synthetic peptide
CAAAAWTIYNFEYW

SEQ ID NO: 679 - protein, 17 aa, Artificial Sequence
  Description of Artificial Sequence: Synthetic peptide
CAARLWGTWTAGDYDYW

SEQ ID NO: 680 - protein, 12 aa, Artificial Sequence
  Description of Artificial Sequence: Synthetic peptide
CAAGRYSGYNSW

SEQ ID NO: 681 - protein, 12 aa, Artificial Sequence
  Description of Artificial Sequence: Synthetic peptide
CAAARRSGRGSW

SEQ ID NO: 682 - protein, 14 aa, Artificial Sequence
  Description of Artificial Sequence: Synthetic peptide
CAAAAWTIYEYDSW

SEQ ID NO: 683 - protein, 14 aa, Artificial Sequence
  Description of Artificial Sequence: Synthetic peptide
CAAAAWTIYDYDYW

SEQ ID NO: 684 - protein, 14 aa, Artificial Sequence
  Description of Artificial Sequence: Synthetic peptide
CAAGPKTPDTRNYW

SEQ ID NO: 685 - protein, 13 aa, Artificial Sequence
  Description of Artificial Sequence: Synthetic peptide
CAAVRITDGRDYW

SEQ ID NO: 686 - protein, 14 aa, Artificial Sequence
  Description of Artificial Sequence: Synthetic peptide
CAAAAWTIYEYDYW

SEQ ID NO: 687 - protein, 14 aa, Artificial Sequence
  Description of Artificial Sequence: Synthetic peptide
CAAAAWRYSEYDYW

SEQ ID NO: 688 - protein, 13 aa, Artificial Sequence
  Description of Artificial Sequence: Synthetic peptide
CATRPRFRRYDSW

SEQ ID NO: 689 - protein, 18 aa, Artificial Sequence
  Description of Artificial Sequence: Synthetic peptide
CAARGGVRSGSPGTYNYW

SEQ ID NO: 690 - protein, 14 aa, Artificial Sequence
  Description of Artificial Sequence: Synthetic peptide
CAAAAWTIYEYDYW

SEQ ID NO: 691 - protein, 17 aa, Artificial Sequence
  Description of Artificial Sequence: Synthetic peptide
CAARLWGTWTAGDYDYW

SEQ ID NO: 692 - protein, 13 aa, Artificial Sequence
  Description of Artificial Sequence: Synthetic peptide
CAARPSYNRYDSW

SEQ ID NO: 693 - protein, 14 aa, Artificial Sequence
  Description of Artificial Sequence: Synthetic peptide
CAAAAWTIYAYDYW

SEQ ID NO: 694 - protein, 14 aa, Artificial Sequence
  Description of Artificial Sequence: Synthetic peptide
CAAAAWTIYEYDYW

SEQ ID NO: 695 - protein, 11 aa, Artificial Sequence
  Description of Artificial Sequence: Synthetic peptide
CAAAGTRFDYW

SEQ ID NO: 696 - protein, 15 aa, Artificial Sequence
  Description of Artificial Sequence: Synthetic peptide
CAAVPWRWTTRRDYW

SEQ ID NO: 697 - protein, 14 aa, Artificial Sequence
  Description of Artificial Sequence: Synthetic peptide
CAAAAWTIYDYDYW

SEQ ID NO: 698 - protein, 14 aa, Artificial Sequence
  Description of Artificial Sequence: Synthetic peptide
CAARDETYGTYDYW

SEQ ID NO: 699 - protein, 17 aa, Artificial Sequence
  Description of Artificial Sequence: Synthetic peptide
CAARLWGTWTAGDYDYW

SEQ ID NO: 700 - protein, 13 aa, Artificial Sequence
  Description of Artificial Sequence: Synthetic peptide
CAARGGYGRYDSW

SEQ ID NO: 701 - protein, 14 aa, Artificial Sequence
  Description of Artificial Sequence: Synthetic peptide
CAAAAWTIYDYDYW

SEQ ID NO: 702 - protein, 14 aa, Artificial Sequence
  Description of Artificial Sequence: Synthetic peptide
CAAAAWTIYGYEYW

SEQ ID NO: 703 - protein, 12 aa, Artificial Sequence
  Description of Artificial Sequence: Synthetic peptide
CAAGRYSGYNSW

SEQ ID NO: 704 - protein, 22 aa, Artificial Sequence
  Description of Artificial Sequence: Synthetic peptide
CAANRRYSFPYWSFWYDDFDYW

SEQ ID NO: 705 - protein, 14 aa, Artificial Sequence
  Description of Artificial Sequence: Synthetic peptide
CAADVWYGSTWRNW

SEQ ID NO: 706 - protein, 12 aa, Artificial Sequence
  Description of Artificial Sequence: Synthetic peptide
CAAVFSRGPLTW

SEQ ID NO: 707 - protein, 12 aa, Artificial Sequence
  Description of Artificial Sequence: Synthetic peptide
CAQGWKIRPTIW

SEQ ID NO: 708 - protein, 14 aa, Artificial Sequence
  Description of Artificial Sequence: Synthetic peptide
CAADVWYGSTWRNW

SEQ ID NO: 709 - protein, 18 aa, Artificial Sequence
  Description of Artificial Sequence: Synthetic peptide
CASSPYGPLYRSTHYYDW

SEQ ID NO: 710 - protein, 8 aa, Artificial Sequence
  Description of Artificial Sequence: Synthetic peptide
CAIGRGSW

SEQ ID NO: 711 - protein, 11 aa, Artificial Sequence
  Description of Artificial Sequence: Synthetic peptide
CAWTTNRGMDW

SEQ ID NO: 712 - protein, 14 aa, Artificial Sequence
  Description of Artificial Sequence: Synthetic peptide
CAADVWYGSTWRNW

SEQ ID NO: 713 - protein, 20 aa, Artificial Sequence
  Description of Artificial Sequence: Synthetic peptide
CAARPYTRPGSMWVSSLYDW

SEQ ID NO: 714 - protein, 13 aa, Artificial Sequence
  Description of Artificial Sequence: Synthetic peptide
CAAQGGVLSGWDW

SEQ ID NO: 715 - protein, 11 aa, Artificial Sequence
  Description of Artificial Sequence: Synthetic peptide
CANSNKPKFDW

SEQ ID NO: 716 - protein, 12 aa, Artificial Sequence
  Description of Artificial Sequence: Synthetic peptide
CAAVFSRGPLTW

SEQ ID NO: 717 - protein, 7 aa, Artificial Sequence
  Description of Artificial Sequence: Synthetic peptide
CASAGRW

SEQ ID NO: 718 - protein, 16 aa, Artificial Sequence
  Description of Artificial Sequence: Synthetic peptide
CAAGAWSSLRKTAASW

SEQ ID NO: 719 - protein, 14 aa, Artificial Sequence
  Description of Artificial Sequence: Synthetic peptide
CAADVWYGSTWRNW

SEQ ID NO: 720 - protein, 8 aa, Artificial Sequence
  Description of Artificial Sequence: Synthetic peptide
CANFNRDW

SEQ ID NO: 721 - protein, 11 aa, Artificial Sequence
  Description of Artificial Sequence: Synthetic peptide
CANSNKPKFDW

SEQ ID NO: 722 - protein, 11 aa, Artificial Sequence
  Description of Artificial Sequence: Synthetic peptide
CAWTTNRGMDW

SEQ ID NO: 723 - protein, 13 aa, Artificial Sequence
  Description of Artificial Sequence: Synthetic peptide
CAAQFTLARHLVW

SEQ ID NO: 724 - protein, 16 aa, Artificial Sequence
  Description of Artificial Sequence: Synthetic peptide
CAAGVWSSLRHTAANW

SEQ ID NO: 725 - protein, 14 aa, Artificial Sequence
  Description of Artificial Sequence: Synthetic peptide
CAADVWYGSTWRNW

SEQ ID NO: 726 - protein, 14 aa, Artificial Sequence
  Description of Artificial Sequence: Synthetic peptide
CAADVWYGSTWRNW

SEQ ID NO: 727 - protein, 11 aa, Artificial Sequence
  Description of Artificial Sequence: Synthetic peptide
CAAEWAAMKDW

SEQ ID NO: 728 - protein, 12 aa, Artificial Sequence
  Description of Artificial Sequence: Synthetic peptide
CAQGWKIIPTDW

SEQ ID NO: 729 - protein, 16 aa, Artificial Sequence
  Description of Artificial Sequence: Synthetic peptide
CAAGVWSSLRHTAANW

SEQ ID NO: 730 - protein, 13 aa, Artificial Sequence
  Description of Artificial Sequence: Synthetic peptide
CAAQFTLARHLVW

SEQ ID NO: 731 - protein, 14 aa, Artificial Sequence
  Description of Artificial Sequence: Synthetic peptide
CAADVWYGSTWRNW

SEQ ID NO: 732 - protein, 14 aa, Artificial Sequence
  Description of Artificial Sequence: Synthetic peptide
CAARRLYSGSYLDW

SEQ ID NO: 733 - protein, 11 aa, Artificial Sequence
  Description of Artificial Sequence: Synthetic peptide
CANSNKPKFDW

SEQ ID NO: 734 - protein, 11 aa, Artificial Sequence
  Description of Artificial Sequence: Synthetic peptide
CANSNKPKFDW

SEQ ID NO: 735 - protein, 13 aa, Artificial Sequence
  Description of Artificial Sequence: Synthetic peptide
CAAQFTLARHLVW

SEQ ID NO: 736 - protein, 11 aa, Artificial Sequence
  Description of Artificial Sequence: Synthetic peptide
CAWTTNRGMDW

SEQ ID NO: 737 - protein, 10 aa, Artificial Sequence
  Description of Artificial Sequence: Synthetic peptide
CAANLRGDNW

SEQ ID NO: 738 - protein, 12 aa, Artificial Sequence
  Description of Artificial Sequence: Synthetic peptide
CAQGWKIVPTNW

SEQ ID NO: 739 - protein, 17 aa, Artificial Sequence
  Description of Artificial Sequence: Synthetic peptide
CASSGPADARNGERWAW

SEQ ID NO: 740 - protein, 11 aa, Artificial Sequence
  Description of Artificial Sequence: Synthetic peptide
CANSNKPKFDW

SEQ ID NO: 741 - protein, 11 aa, Artificial Sequence
  Description of Artificial Sequence: Synthetic peptide
CANSNKPKFDW

SEQ ID NO: 742 - protein, 11 aa, Artificial Sequence
  Description of Artificial Sequence: Synthetic peptide
CANSNKPKFDW

SEQ ID NO: 743 - protein, 14 aa, Artificial Sequence
  Description of Artificial Sequence: Synthetic peptide
CAADVWYGSTWRNW

SEQ ID NO: 744 - protein, 14 aa, Artificial Sequence
  Description of Artificial Sequence: Synthetic peptide
CAADVWYGSTWRNW

SEQ ID NO: 745 - protein, 13 aa, Artificial Sequence
  Description of Artificial Sequence: Synthetic peptide
CAAQFILARHLVW

SEQ ID NO: 746 - protein, 10 aa, Artificial Sequence
  Description of Artificial Sequence: Synthetic peptide
CAQVSQWRAW

SEQ ID NO: 747 - protein, 14 aa, Artificial Sequence
  Description of Artificial Sequence: Synthetic peptide
CAADVWYGSTWRNW

SEQ ID NO: 748 - protein, 14 aa, Artificial Sequence
  Description of Artificial Sequence: Synthetic peptide
CATWTTTWGRNRDW

SEQ ID NO: 749 - protein, 9 aa, Artificial Sequence
  Description of Artificial Sequence: Synthetic peptide
CANGGSSYW

SEQ ID NO: 750 - protein, 12 aa, Artificial Sequence
  Description of Artificial Sequence: Synthetic peptide
CAGSWSYPGLTW

SEQ ID NO: 751 - protein, 14 aa, Artificial Sequence
  Description of Artificial Sequence: Synthetic peptide
CAADVWYGSTWRNW

SEQ ID NO: 752 - protein, 18 aa, Artificial Sequence
  Description of Artificial Sequence: Synthetic peptide
CAADFWLARLRVADDYDW

SEQ ID NO: 753 - protein, 12 aa, Artificial Sequence
  Description of Artificial Sequence: Synthetic peptide
CAQGWKIVPTNW

SEQ ID NO: 754 - protein, 8 aa, Artificial Sequence
  Description of Artificial Sequence: Synthetic peptide
CALYRVNW

SEQ ID NO: 755 - protein, 13 aa, Artificial Sequence
  Description of Artificial Sequence: Synthetic peptide
CAAQGGVLSGWDW

SEQ ID NO: 756 - protein, 7 aa, Artificial Sequence
  Description of Artificial Sequence: Synthetic peptide
CASAGRW

SEQ ID NO: 757 - protein, 7 aa, Artificial Sequence
  Description of Artificial Sequence: Synthetic peptide
CASAGRW

SEQ ID NO: 758 - protein, 18 aa, Artificial Sequence
  Description of Artificial Sequence: Synthetic peptide
CASSPYGPLYRSTHYYDW

SEQ ID NO: 759 - protein, 14 aa, Artificial Sequence
  Description of Artificial Sequence: Synthetic peptide
CATGWQSTTKSQGW

SEQ ID NO: 760 - protein, 9 aa, Artificial Sequence
  Description of Artificial Sequence: Synthetic peptide
CAAFREYHW

SEQ ID NO: 761 - protein, 16 aa, Artificial Sequence
  Description of Artificial Sequence: Synthetic peptide
CAAGVWSSLRHTAANW

SEQ ID NO: 762 - protein, 14 aa, Artificial Sequence
  Description of Artificial Sequence: Synthetic peptide
CAADVWYGSTWRNW

SEQ ID NO: 763 - protein, 14 aa, Artificial Sequence
  Description of Artificial Sequence: Synthetic peptide
CAADVWYGSTWRNW

SEQ ID NO: 764 - protein, 12 aa, Artificial Sequence
  Description of Artificial Sequence: Synthetic peptide
CAAVFSRGPLTW

SEQ ID NO: 765 - protein, 14 aa, Artificial Sequence
  Description of Artificial Sequence: Synthetic peptide
CAADVWYGSTWRNW

SEQ ID NO: 766 - protein, 14 aa, Artificial Sequence
  Description of Artificial Sequence: Synthetic peptide
CAADVWYGSTWRNW

SEQ ID NO: 767 - protein, 12 aa, Artificial Sequence
  Description of Artificial Sequence: Synthetic peptide
CAAVFSRGPLTW

SEQ ID NO: 768 - protein, 14 aa, Artificial Sequence
  Description of Artificial Sequence: Synthetic peptide
CAADVWYGSTWRNW

SEQ ID NO: 769 - protein, 20 aa, Artificial Sequence
  Description of Artificial Sequence: Synthetic peptide
CAARPYTRPGSMWVSSLYDW

SEQ ID NO: 770 - protein, 14 aa, Artificial Sequence
  Description of Artificial Sequence: Synthetic peptide
CAADVWYGSTWRNW

SEQ ID NO: 771 - protein, 11 aa, Artificial Sequence
  Description of Artificial Sequence: Synthetic peptide
CANSNKPKFDW

SEQ ID NO: 772 - protein, 18 aa, Artificial Sequence
  Description of Artificial Sequence: Synthetic peptide
CASSPYGPLYRSTHYYDW

SEQ ID NO: 773 - protein, 14 aa, Artificial Sequence
  Description of Artificial Sequence: Synthetic peptide
CAADVWYGSTWRNW

SEQ ID NO: 774 - protein, 14 aa, Artificial Sequence
  Description of Artificial Sequence: Synthetic peptide
CAADVWYGSTWRNW

SEQ ID NO: 775 - protein, 14 aa, Artificial Sequence
  Description of Artificial Sequence: Synthetic peptide
CAADVWYGSTWRNW

SEQ ID NO: 776 - protein, 17 aa, Artificial Sequence
  Description of Artificial Sequence: Synthetic peptide
CAASEWGGSDYDHDYDW

SEQ ID NO: 777 - protein, 18 aa, Artificial Sequence
  Description of Artificial Sequence: Synthetic peptide
CASSPYGPLYRSTHYYDW

SEQ ID NO: 778 - protein, 14 aa, Artificial Sequence
  Description of Artificial Sequence: Synthetic peptide
CAADVWYGSTWRNW

SEQ ID NO: 779 - protein, 14 aa, Artificial Sequence
  Description of Artificial Sequence: Synthetic peptide
CAADVWYGSTWRNW

SEQ ID NO: 780 - protein, 14 aa, Artificial Sequence
  Description of Artificial Sequence: Synthetic peptide
CAADVWYGSTWRNW

SEQ ID NO: 781 - protein, 17 aa, Artificial Sequence
  Description of Artificial Sequence: Synthetic peptide
CAASEWGGSDYDHDYDW

SEQ ID NO: 782 - protein, 14 aa, Artificial Sequence
  Description of Artificial Sequence: Synthetic peptide
CAADVWYGSTWRNW

SEQ ID NO: 783 - protein, 14 aa, Artificial Sequence
  Description of Artificial Sequence: Synthetic peptide
CAADVWYGSTWRNW

SEQ ID NO: 784 - protein, 13 aa, Artificial Sequence
  Description of Artificial Sequence: Synthetic peptide
CAAKRLRSGRWTW

SEQ ID NO: 785 - protein, 11 aa, Artificial Sequence
  Description of Artificial Sequence: Synthetic peptide
CANSNKPKFDW

SEQ ID NO: 786 - protein, 18 aa, Artificial Sequence
  Description of Artificial Sequence: Synthetic peptide
CAAETFGSGSSLMSEYDW

SEQ ID NO: 787 - protein, 12 aa, Artificial Sequence
  Description of Artificial Sequence: Synthetic peptide
CAQGWKIVPTNW

SEQ ID NO: 788 - protein, 14 aa, Artificial Sequence
  Description of Artificial Sequence: Synthetic peptide
CAADVWYGSTWRNW

SEQ ID NO: 789 - protein, 18 aa, Artificial Sequence
  Description of Artificial Sequence: Synthetic peptide
CASSPYGPLYRSTHYYDW

SEQ ID NO: 790 - protein, 14 aa, Artificial Sequence
  Description of Artificial Sequence: Synthetic peptide
CAAVRTYGSATYDW

SEQ ID NO: 791 - protein, 12 aa, Artificial Sequence
  Description of Artificial Sequence: Synthetic peptide
CAAGGRYSARVW

SEQ ID NO: 792 - protein, 14 aa, Artificial Sequence
  Description of Artificial Sequence: Synthetic peptide
CATYGYDSGRYYSW

SEQ ID NO: 793 - protein, 14 aa, Artificial Sequence
  Description of Artificial Sequence: Synthetic peptide
CAADVWYGSTWRNW

SEQ ID NO: 794 - protein, 14 aa, Artificial Sequence
  Description of Artificial Sequence: Synthetic peptide
CAADVWYGSTWRNW

SEQ ID NO: 795 - protein, 14 aa, Artificial Sequence
  Description of Artificial Sequence: Synthetic peptide
CAADVWYGSTWRNW

SEQ ID NO: 796 - protein, 19 aa, Artificial Sequence
  Description of Artificial Sequence: Synthetic peptide
CAATQWGSSGWKQARWYDW

SEQ ID NO: 797 - protein, 14 aa, Artificial Sequence
  Description of Artificial Sequence: Synthetic peptide
CAADVWYGSTWRNW

SEQ ID NO: 798 - protein, 14 aa, Artificial Sequence
  Description of Artificial Sequence: Synthetic peptide
CAADVWYGSTWRNW

SEQ ID NO: 799 - protein, 16 aa, Artificial Sequence
  Description of Artificial Sequence: Synthetic peptide
CAVNGRWRSWSSQRDW

SEQ ID NO: 800 - protein, 14 aa, Artificial Sequence
  Description of Artificial Sequence: Synthetic peptide
CAADVWYGSTWRNW

SEQ ID NO: 801 - protein, 14 aa, Artificial Sequence
  Description of Artificial Sequence: Synthetic peptide
CAADVWYGSTWRNW

SEQ ID NO: 802 - protein, 12 aa, Artificial Sequence
  Description of Artificial Sequence: Synthetic peptide
CAAVFSRGLLTC

SEQ ID NO: 803 - protein, 15 aa, Artificial Sequence
  Description of Artificial Sequence: Synthetic peptide
CAAARFAPGSRGYDW

SEQ ID NO: 804 - protein, 14 aa, Artificial Sequence
  Description of Artificial Sequence: Synthetic peptide
CAADVWYGSTWRNW

SEQ ID NO: 805 - protein, 11 aa, Artificial Sequence
  Description of Artificial Sequence: Synthetic peptide
CAAQGGVLSAW

SEQ ID NO: 806 - protein, 14 aa, Artificial Sequence
  Description of Artificial Sequence: Synthetic peptide
CAADVWYGSTWRNW

SEQ ID NO: 807 - protein, 14 aa, Artificial Sequence
  Description of Artificial Sequence: Synthetic peptide
CAADVWYGSTWRNW

SEQ ID NO: 808 - protein, 14 aa, Artificial Sequence
  Description of Artificial Sequence: Synthetic peptide
CAADVWYGSTWRNW

SEQ ID NO: 809 - protein, 14 aa, Artificial Sequence
  Description of Artificial Sequence: Synthetic peptide
CAADVWYGSTWRNW

SEQ ID NO: 810 - protein, 14 aa, Artificial Sequence
  Description of Artificial Sequence: Synthetic peptide
CAADVWYGSTWRNW

SEQ ID NO: 811 - protein, 13 aa, Artificial Sequence
  Description of Artificial Sequence: Synthetic peptide
CAARPNTRPGSMW

SEQ ID NO: 812 - protein, 14 aa, Artificial Sequence
  Description of Artificial Sequence: Synthetic peptide
CAADVWYGSTWRNW

SEQ ID NO: 813 - protein, 13 aa, Artificial Sequence
  Description of Artificial Sequence: Synthetic peptide
CAMSSVTRGSSDW

SEQ ID NO: 814 - protein, 14 aa, Artificial Sequence
  Description of Artificial Sequence: Synthetic peptide
CAADVWYGSTWRNW

SEQ ID NO: 815 - protein, 11 aa, Artificial Sequence
  Description of Artificial Sequence: Synthetic peptide
CAAFRGRMYDW

SEQ ID NO: 816 - protein, 14 aa, Artificial Sequence
  Description of Artificial Sequence: Synthetic peptide
CAADVWYGSTWRNW

SEQ ID NO: 817 - protein, 12 aa, Artificial Sequence
  Description of Artificial Sequence: Synthetic peptide
CAAVFSRGPLTW

SEQ ID NO: 818 - protein, 13 aa, Artificial Sequence
  Description of Artificial Sequence: Synthetic peptide
CAMSSVTRGSSDW

SEQ ID NO: 819 - protein, 12 aa, Artificial Sequence
  Description of Artificial Sequence: Synthetic peptide
CARSWPYFFYCW

SEQ ID NO: 820 - protein, 12 aa, Artificial Sequence
  Description of Artificial Sequence: Synthetic peptide
CARIFSYALDYW

SEQ ID NO: 821 - protein, 11 aa, Artificial Sequence
  Description of Artificial Sequence: Synthetic peptide
CAKDQWPFDYW

SEQ ID NO: 822 - protein, 14 aa, Artificial Sequence
  Description of Artificial Sequence: Synthetic peptide
CAKYTGRWEPYDYW

SEQ ID NO: 823 - protein, 11 aa, Artificial Sequence
  Description of Artificial Sequence: Synthetic peptide
CAKAFSTFDYW

SEQ ID NO: 824 - protein, 9 aa, Artificial Sequence
  Description of Artificial Sequence: Synthetic peptide
CASLSRGYW

SEQ ID NO: 825 - protein, 12 aa, Artificial Sequence
  Description of Artificial Sequence: Synthetic peptide
CARSYGGGFDYW

SEQ ID NO: 826 - protein, 14 aa, Artificial Sequence
  Description of Artificial Sequence: Synthetic peptide
CAKYTGRWEPYDYW

SEQ ID NO: 827 - protein, 12 aa, Artificial Sequence
  Description of Artificial Sequence: Synthetic peptide
CAKKLSNGFDYW

SEQ ID NO: 828 - protein, 12 aa, Artificial Sequence
  Description of Artificial Sequence: Synthetic peptide
CAKGWFGGFNYW

SEQ ID NO: 829 - protein, 14 aa, Artificial Sequence
  Description of Artificial Sequence: Synthetic peptide
CARSSFYYYALDYW

SEQ ID NO: 830 - protein, 14 aa, Artificial Sequence
  Description of Artificial Sequence: Synthetic peptide
CAKYTGRWEPYDYW

SEQ ID NO: 831 - protein, 14 aa, Artificial Sequence
  Description of Artificial Sequence: Synthetic peptide
CARVIAAAGAFDYW

SEQ ID NO: 832 - protein, 11 aa, Artificial Sequence
  Description of Artificial Sequence: Synthetic peptide
CAKSGRRFDYW

SEQ ID NO: 833 - protein, 9 aa, Artificial Sequence
  Description of Artificial Sequence: Synthetic peptide
CASLSRGYW

SEQ ID NO: 834 - protein, 12 aa, Artificial Sequence
  Description of Artificial Sequence: Synthetic peptide
CAKKLSNGFDYW

SEQ ID NO: 835 - protein, 12 aa, Artificial Sequence
  Description of Artificial Sequence: Synthetic peptide
CARSYGGGFDYW

SEQ ID NO: 836 - protein, 17 aa, Artificial Sequence
  Description of Artificial Sequence: Synthetic peptide
CAKAHGNPVSDLSFDYW

SEQ ID NO: 837 - protein, 12 aa, Artificial Sequence
  Description of Artificial Sequence: Synthetic peptide
CAKWFSRNFDYC

SEQ ID NO: 838 - protein, 12 aa, Artificial Sequence
  Description of Artificial Sequence: Synthetic peptide
CARSYGGGFDYW

SEQ ID NO: 839 - protein, 12 aa, Artificial Sequence
  Description of Artificial Sequence: Synthetic peptide
CARSYGGGFDYW

SEQ ID NO: 840 - protein, 14 aa, Artificial Sequence
  Description of Artificial Sequence: Synthetic peptide
CAKSSFDKYNFDYW

SEQ ID NO: 841 - protein, 21 aa, Artificial Sequence
  Description of Artificial Sequence: Synthetic peptide
CARGGRLYDILTGQGAPFDYW

SEQ ID NO: 842 - protein, 11 aa, Artificial Sequence
  Description of Artificial Sequence: Synthetic peptide
CAKGRRRFDYW

SEQ ID NO: 843 - protein, 15 aa, Artificial Sequence
  Description of Artificial Sequence: Synthetic peptide
CARGPYGRYAALDYW

SEQ ID NO: 844 - protein, 14 aa, Artificial Sequence
  Description of Artificial Sequence: Synthetic peptide
CARSSFYYYALDYW

SEQ ID NO: 845 - protein, 12 aa, Artificial Sequence
  Description of Artificial Sequence: Synthetic peptide
CAKAGPRGFDYW

SEQ ID NO: 846 - protein, 15 aa, Artificial Sequence
  Description of Artificial Sequence: Synthetic peptide
CAKVKLGGGPNFDYW

SEQ ID NO: 847 - protein, 13 aa, Artificial Sequence
  Description of Artificial Sequence: Synthetic peptide
CAKGNSRYVFDYW

SEQ ID NO: 848 - protein, 14 aa, Artificial Sequence
  Description of Artificial Sequence: Synthetic peptide
CARAGQWLGDFDYW

SEQ ID NO: 849 - protein, 15 aa, Artificial Sequence
  Description of Artificial Sequence: Synthetic peptide
CAKSGTRIKQGFDYW

SEQ ID NO: 850 - protein, 14 aa, Artificial Sequence
  Description of Artificial Sequence: Synthetic peptide
CAKDRIPNLHFDYW

SEQ ID NO: 851 - protein, 13 aa, Artificial Sequence
  Description of Artificial Sequence: Synthetic peptide
CARGGYYYALDYW

SEQ ID NO: 852 - protein, 18 aa, Artificial Sequence
  Description of Artificial Sequence: Synthetic peptide
CAKIRNLHWDVGRQFDYW

SEQ ID NO: 853 - protein, 15 aa, Artificial Sequence
  Description of Artificial Sequence: Synthetic peptide
CARDGSYSSSWYGYW

SEQ ID NO: 854 - protein, 11 aa, Artificial Sequence
  Description of Artificial Sequence: Synthetic peptide
CAKHWNRFDYW

SEQ ID NO: 855 - protein, 12 aa, Artificial Sequence
  Description of Artificial Sequence: Synthetic peptide
CARDAYLHFDYW

SEQ ID NO: 856 - protein, 16 aa, Artificial Sequence
  Description of Artificial Sequence: Synthetic peptide
CAKSPLVRNNGQFDYW

SEQ ID NO: 857 - protein, 14 aa, Artificial Sequence
  Description of Artificial Sequence: Synthetic peptide
CARGGSWEEDFDYW

SEQ ID NO: 858 - protein, 14 aa, Artificial Sequence
  Description of Artificial Sequence: Synthetic peptide
CAKSSFDKYNFDYW

SEQ ID NO: 859 - protein, 15 aa, Artificial Sequence
  Description of Artificial Sequence: Synthetic peptide
CAKGGGLPYLSFDYW

SEQ ID NO: 860 - protein, 12 aa, Artificial Sequence
  Description of Artificial Sequence: Synthetic peptide
CAKGWLGNFDYW

SEQ ID NO: 861 - protein, 13 aa, Artificial Sequence
  Description of Artificial Sequence: Synthetic peptide
CARRHWPGGFDYW

SEQ ID NO: 862 - protein, 12 aa, Artificial Sequence
  Description of Artificial Sequence: Synthetic peptide
CARDTYLHFDYW

SEQ ID NO: 863 - protein, 14 aa, Artificial Sequence
  Description of Artificial Sequence: Synthetic peptide
CAKRWTFNTAFDYW

SEQ ID NO: 864 - protein, 13 aa, Artificial Sequence
  Description of Artificial Sequence: Synthetic peptide
CAREWQHGPVAYW

SEQ ID NO: 865 - protein, 16 aa, Artificial Sequence
  Description of Artificial Sequence: Synthetic peptide
CAKSPSSLLATYFDYW

SEQ ID NO: 866 - protein, 12 aa, Artificial Sequence
  Description of Artificial Sequence: Synthetic peptide
CARAGGGGFDYC

SEQ ID NO: 867 - protein, 12 aa, Artificial Sequence
  Description of Artificial Sequence: Synthetic peptide
CARSYGGGFDYW

SEQ ID NO: 868 - protein, 12 aa, Artificial Sequence
  Description of Artificial Sequence: Synthetic peptide
CAKAYYGGFDYW

SEQ ID NO: 869 - protein, 12 aa, Artificial Sequence
  Description of Artificial Sequence: Synthetic peptide
CARDTYLHFDYW

SEQ ID NO: 870 - protein, 12 aa, Artificial Sequence
  Description of Artificial Sequence: Synthetic peptide
CARVWRNHLDYW

SEQ ID NO: 871 - protein, 12 aa, Artificial Sequence
  Description of Artificial Sequence: Synthetic peptide
CARVWRNSLDYW

SEQ ID NO: 872 - protein, 15 aa, Artificial Sequence
  Description of Artificial Sequence: Synthetic peptide
CARAPRGYSYGYYYW

SEQ ID NO: 873 - protein, 11 aa, Artificial Sequence
  Description of Artificial Sequence: Synthetic peptide
CAKSGRRFDYW

SEQ ID NO: 874 - protein, 9 aa, Artificial Sequence
  Description of Artificial Sequence: Synthetic peptide
CASLSRGYC

SEQ ID NO: 875 - protein, 14 aa, Artificial Sequence
  Description of Artificial Sequence: Synthetic peptide
CARVIAAAGAFDYW

SEQ ID NO: 876 - protein, 12 aa, Artificial Sequence
  Description of Artificial Sequence: Synthetic peptide
CAKAVPKGFDYW

SEQ ID NO: 877 - protein, 16 aa, Artificial Sequence
  Description of Artificial Sequence: Synthetic peptide
CARSPLVHYNRGFQYC

SEQ ID NO: 878 - protein, 19 aa, Artificial Sequence
  Description of Artificial Sequence: Synthetic peptide
CAKQAPGEKWLARGRLDYW

SEQ ID NO: 879 - protein, 12 aa, Artificial Sequence
  Description of Artificial Sequence: Synthetic peptide
CARSYGGGFDYW

SEQ ID NO: 880 - protein, 11 aa, Artificial Sequence
  Description of Artificial Sequence: Synthetic peptide
CAKGTRTFDYW

SEQ ID NO: 881 - protein, 14 aa, Artificial Sequence
  Description of Artificial Sequence: Synthetic peptide
CARVITPLDILTYW

SEQ ID NO: 882 - protein, 12 aa, Artificial Sequence
  Description of Artificial Sequence: Synthetic peptide
CARSYGGGFDYW

SEQ ID NO: 883 - protein, 16 aa, Artificial Sequence
  Description of Artificial Sequence: Synthetic peptide
CARHGAGYFGWYNDCC

SEQ ID NO: 884 - protein, 16 aa, Artificial Sequence
  Description of Artificial Sequence: Synthetic peptide
CAKSSLPSGQGHFDYW

SEQ ID NO: 885 - protein, 13 aa, Artificial Sequence
  Description of Artificial Sequence: Synthetic peptide
CARGGYYYALDYW

SEQ ID NO: 886 - protein, 9 aa, Artificial Sequence
  Description of Artificial Sequence: Synthetic peptide
CANLSPGYW

SEQ ID NO: 887 - protein, 12 aa, Artificial Sequence
  Description of Artificial Sequence: Synthetic peptide
CARIFSYALDYW

SEQ ID NO: 888 - protein, 11 aa, Artificial Sequence
  Description of Artificial Sequence: Synthetic peptide
CPKGGTSFDYW

SEQ ID NO: 889 - protein, 9 aa, Artificial Sequence
  Description of Artificial Sequence: Synthetic peptide
CARLSRGYW

SEQ ID NO: 890 - protein, 15 aa, Artificial Sequence
  Description of Artificial Sequence: Synthetic peptide
CAKGFRLFPRTFDYW

SEQ ID NO: 891 - protein, 15 aa, Artificial Sequence
  Description of Artificial Sequence: Synthetic peptide
CAKGFRLFPRTFDYW

SEQ ID NO: 892 - protein, 15 aa, Artificial Sequence
  Description of Artificial Sequence: Synthetic peptide
CAKVASDRSVLYDYW

SEQ ID NO: 893 - protein, 14 aa, Artificial Sequence
  Description of Artificial Sequence: Synthetic peptide
CAKVRPFWGTFDYW

SEQ ID NO: 894 - protein, 13 aa, Artificial Sequence
  Description of Artificial Sequence: Synthetic peptide
CAKGNSRYVFDYW

SEQ ID NO: 895 - protein, 11 aa, Artificial Sequence
  Description of Artificial Sequence: Synthetic peptide
CAKGGTSFDYW

SEQ ID NO: 896 - protein, 12 aa, Artificial Sequence
  Description of Artificial Sequence: Synthetic peptide
CARSYGGGFDYW

SEQ ID NO: 897 - protein, 12 aa, Artificial Sequence
  Description of Artificial Sequence: Synthetic peptide
CARSGPYYFDYW

SEQ ID NO: 898 - protein, 14 aa, Artificial Sequence
  Description of Artificial Sequence: Synthetic peptide
CAKSSFDKYNFDYW

SEQ ID NO: 899 - protein, 12 aa, Artificial Sequence
  Description of Artificial Sequence: Synthetic peptide
CARDTYLHFDYW

SEQ ID NO: 900 - protein, 13 aa, Artificial Sequence
  Description of Artificial Sequence: Synthetic peptide
CAKGNSRYMFDYW

SEQ ID NO: 901 - protein, 13 aa, Artificial Sequence
  Description of Artificial Sequence: Synthetic peptide
CATAESYKGYDYW

SEQ ID NO: 902 - protein, 14 aa, Artificial Sequence
  Description of Artificial Sequence: Synthetic peptide
CAKYTGRWEPYDYW

SEQ ID NO: 903 - protein, 11 aa, Artificial Sequence [sequence omitted]

SEQ ID NO: 904 - protein, 11 aa, Artificial Sequence
  Description of Artificial Sequence: Synthetic peptide
CAKGGTSFDYW

SEQ ID NO: 905 - protein, 12 aa, Artificial Sequence
  Description of Artificial Sequence: Synthetic peptide
CAKKLSNGFDYW

SEQ ID NO: 906 - protein, 12 aa, Artificial Sequence
  Description of Artificial Sequence: Synthetic peptide
CAKVWRNHLDYW

SEQ ID NO: 907 - protein, 12 aa, Artificial Sequence
  Description of Artificial Sequence: Synthetic peptide
CARSYRGGFDYW

SEQ ID NO: 908 - protein, 12 aa, Artificial Sequence
  Description of Artificial Sequence: Synthetic peptide
CARVWRNHLDYW

SEQ ID NO: 909 - protein, 14 aa, Artificial Sequence
  Description of Artificial Sequence: Synthetic peptide
CARVIAAAGAFDYW

SEQ ID NO: 910 - protein, 21 aa, Artificial Sequence
  Description of Artificial Sequence: Synthetic peptide
CARGGRLYDILTGQGAPFDYW

SEQ ID NO: 911 - protein, 14 aa, Artificial Sequence
  Description of Artificial Sequence: Synthetic peptide
CAKSSFDKYNFDYW

SEQ ID NO: 912 - protein, 13 aa, Artificial Sequence
  Description of Artificial Sequence: Synthetic peptide
CAKGHSLCVFYYW

SEQ ID NO: 913 - protein, 12 aa, Artificial Sequence
  Description of Artificial Sequence: Synthetic peptide
CARDTYLHFDYW

SEQ ID NO: 914 - protein, 15 aa, Artificial Sequence
  Description of Artificial Sequence: Synthetic peptide
CARGSYIIWSALDYW

SEQ ID NO: 915 - protein, 12 aa, Artificial Sequence
  Description of Artificial Sequence: Synthetic peptide
CARVWRNHLDYW

SEQ ID NO: 916 - protein, 12 aa, Artificial Sequence
  Description of Artificial Sequence: Synthetic peptide
CAREGLWAFDYW

SEQ ID NO: 917 - protein, 12 aa, Artificial Sequence
  Description of Artificial Sequence: Synthetic peptide
CAKWSSRAFDYW

SEQ ID NO: 918 - protein, 14 aa, Artificial Sequence
  Description of Artificial Sequence: Synthetic peptide
CAKYTGRWEPYDYW

SEQ ID NO: 919 - protein, 11 aa, Artificial Sequence
  Description of Artificial Sequence: Synthetic peptide
CAKGGTSYDYW

SEQ ID NO: 920 - protein, 13 aa, Artificial Sequence
  Description of Artificial Sequence: Synthetic peptide
CAKGNSRYVFDYW

SEQ ID NO: 921 - protein, 13 aa, Artificial Sequence
  Description of Artificial Sequence: Synthetic peptide
CARRHWPGGFDYW

SEQ ID NO: 922 - protein, 14 aa, Artificial Sequence
  Description of Artificial Sequence: Synthetic peptide
CARHNRAIGTFDYW

SEQ ID NO: 923 - protein, 10 aa, Artificial Sequence
  Description of Artificial Sequence: Synthetic peptide
CARSVLLDYW

SEQ ID NO: 924 - protein, 12 aa, Artificial Sequence
  Description of Artificial Sequence: Synthetic peptide
CARSDRVGFCCW

SEQ ID NO: 925 - protein, 12 aa, Artificial Sequence
  Description of Artificial Sequence: Synthetic peptide
CAKVRTFRLNYC

SEQ ID NO: 926 - protein, 14 aa, Artificial Sequence
  Description of Artificial Sequence: Synthetic peptide
CAKYTGRWEPYDYW

SEQ ID NO: 927 - protein, 19 aa, Artificial Sequence
  Description of Artificial Sequence: Synthetic peptide
CAKQAPGEKWLARGRLHYW

SEQ ID NO: 928 - protein, 14 aa, Artificial Sequence
  Description of Artificial Sequence: Synthetic peptide
CAKVRPFWGTFDYW

SEQ ID NO: 929 - protein, 12 aa, Artificial Sequence
  Description of Artificial Sequence: Synthetic peptide
CAKAVPKGFDYW

SEQ ID NO: 930 - protein, 11 aa, Artificial Sequence
  Description of Artificial Sequence: Synthetic peptide
CAKTPRKFDYW

SEQ ID NO: 931 - protein, 12 aa, Artificial Sequence
  Description of Artificial Sequence: Synthetic peptide
CAKAVPKGFDYW

SEQ ID NO: 932 - protein, 19 aa, Artificial Sequence
  Description of Artificial Sequence: Synthetic peptide
CAKQAPGEKWLARGRLDYW

SEQ ID NO: 933 - protein, 12 aa, Artificial Sequence
  Description of Artificial Sequence: Synthetic peptide
CARSYGGGFDYW

SEQ ID NO: 934 - protein, 12 aa, Artificial Sequence
  Description of Artificial Sequence: Synthetic peptide
CARVWRNHLDYW

SEQ ID NO: 935 - protein, 14 aa, Artificial Sequence
  Description of Artificial Sequence: Synthetic peptide
CARWRGGLSAFDVW

SEQ ID NO: 936 - protein, 19 aa, Artificial Sequence
  Description of Artificial Sequence: Synthetic peptide
CARAFGLASGKGPGVFDYW

SEQ ID NO: 937 - protein, 15 aa, Artificial Sequence
  Description of Artificial Sequence: Synthetic peptide
CARVLGNSGRGLDYW

SEQ ID NO: 938 - protein, 15 aa, Artificial Sequence
  Description of Artificial Sequence: Synthetic peptide
CARGSHQLYYAFEYW

SEQ ID NO: 939 - protein, 16 aa, Artificial Sequence
  Description of Artificial Sequence: Synthetic peptide
CARDVEGQVGHFFDPW

SEQ ID NO: 940 - protein, 20 aa, Artificial Sequence
  Description of Artificial Sequence: Synthetic peptide
CAKGIKAFGGTRLPLYFDSW

SEQ ID NO: 941 - protein, 15 aa, Artificial Sequence
  Description of Artificial Sequence: Synthetic peptide
CAKHLLSRSRGLDVW

SEQ ID NO: 942 - protein, 15 aa, Artificial Sequence
  Description of Artificial Sequence: Synthetic peptide
CAKHLLARSGGMHLW

SEQ ID NO: 943 - protein, 13 aa, Artificial Sequence
  Description of Artificial Sequence: Synthetic peptide
CARSTRDRAFDYW

SEQ ID NO: 944 - protein, 13 aa, Artificial Sequence
  Description of Artificial Sequence: Synthetic peptide
CVKVGDYFAFDHW

SEQ ID NO: 945 - protein, 15 aa, Artificial Sequence
  Description of Artificial Sequence: Synthetic peptide
CARGTALVRRAFDIW

SEQ ID NO: 946 - protein, 19 aa, Artificial Sequence
  Description of Artificial Sequence: Synthetic peptide
CARAFGLASGKGPGVFDYW

SEQ ID NO: 947 - protein, 14 aa, Artificial Sequence
  Description of Artificial Sequence: Synthetic peptide
CAKHRVGARAFDVW

SEQ ID NO: 948 - protein, 14 aa, Artificial Sequence
  Description of Artificial Sequence: Synthetic peptide
CAKHRVGARAFDVW

SEQ ID NO: 949 - protein, 16 aa, Artificial Sequence
  Description of Artificial Sequence: Synthetic peptide
CARHPRDFGIHGLDVW

SEQ ID NO: 950 - protein, 13 aa, Artificial Sequence
  Description of Artificial Sequence: Synthetic peptide
CARVRGGYYYDTW

SEQ ID NO: 951 - protein, 15 aa, Artificial Sequence
  Description of Artificial Sequence: Synthetic peptide
CATGGGHFRSGRDVW

SEQ ID NO: 952 - protein, 14 aa, Artificial Sequence
  Description of Artificial Sequence: Synthetic peptide
CARHLRLGRGFDSW

SEQ ID NO: 953 - protein, 15 aa, Artificial Sequence
  Description of Artificial Sequence: Synthetic peptide
CATPSGGIGRRLDVW

SEQ ID NO: 954 - protein, 19 aa, Artificial Sequence
  Description of Artificial Sequence: Synthetic peptide
CAKAFGLASGKGPGVFDYW

SEQ ID NO: 955 - protein, 18 aa, Artificial Sequence
  Description of Artificial Sequence: Synthetic peptide
CARESRTLFGVPNAFDIW

SEQ ID NO: 956 - protein, 16 aa, Artificial Sequence
  Description of Artificial Sequence: Synthetic peptide
RSSQSLVHSTGNTYLH

SEQ ID NO: 957 - protein, 11 aa, Artificial Sequence
  Description of Artificial Sequence: Synthetic peptide
RTSQDIGNYLN

SEQ ID NO: 958 - protein, 16 aa, Artificial Sequence
  Description of Artificial Sequence: Synthetic peptide
RSSQSLVHSTGNTYLH

SEQ ID NO: 959 - protein, 16 aa, Artificial Sequence
  Description of Artificial Sequence: Synthetic peptide
RSSQSLVHSTGNTYLH

SEQ ID NO: 960 - protein, 16 aa, Artificial Sequence
  Description of Artificial Sequence: Synthetic peptide
RSSQSLVHSTGNTYLH

SEQ ID NO: 961 - protein, 16 aa, Artificial Sequence
  Description of Artificial Sequence: Synthetic peptide
RSSQSLVHSTGNTYLH

SEQ ID NO: 962 - protein, 11 aa, Artificial Sequence
  Description of Artificial Sequence: Synthetic peptide
SGDKLRNKYAS

SEQ ID NO: 963 - protein, 16 aa, Artificial Sequence
  Description of Artificial Sequence: Synthetic peptide
RSSQSLVHSTGNTYLH

SEQ ID NO: 964 - protein, 16 aa, Artificial Sequence
  Description of Artificial Sequence: Synthetic peptide
RSSQSLVHSTGNTYLH

SEQ ID NO: 965 - protein, 16 aa, Artificial Sequence
  Description of Artificial Sequence: Synthetic peptide
RSSQSLVHSTGNTYLH

SEQ ID NO: 966 - protein, 16 aa, Artificial Sequence
  Description of Artificial Sequence: Synthetic peptide
RSSQSLVHSTGNTYLH

SEQ ID NO: 967 - protein, 11 aa, Artificial Sequence
  Description of Artificial Sequence: Synthetic peptide
SGDKLGHTYTS

SEQ ID NO: 968 - protein, 11 aa, Artificial Sequence
  Description of Artificial Sequence: Synthetic peptide
RASQSIREYLH

SEQ ID NO: 969 - protein, 11 aa, Artificial Sequence
  Description of Artificial Sequence: Synthetic peptide
SGDTLGGKYAW

SEQ ID NO: 970 - protein, 13 aa, Artificial Sequence
  Description of Artificial Sequence: Synthetic peptide
QSSQSVYSNNELS

SEQ ID NO: 971 - protein, 11 aa, Artificial Sequence
  Description of Artificial Sequence: Synthetic peptide
SGDKLGHTYTS

SEQ ID NO: 972 - protein, 11 aa, Artificial Sequence
  Description of Artificial Sequence: Synthetic peptide
RASQTIERRLN

SEQ ID NO: 973 - protein, 11 aa, Artificial Sequence
  Description of Artificial Sequence: Synthetic peptide
SGDKLGDKYTS

SEQ ID NO: 974 - protein, 16 aa, Artificial Sequence
  Description of Artificial Sequence: Synthetic peptide
RSSQSLVHSTGNTYLH

SEQ ID NO: 975 - protein, 16 aa, Artificial Sequence
  Description of Artificial Sequence: Synthetic peptide
RSSQSLVHSTGNTYLH

SEQ ID NO: 976 - protein, 16 aa, Artificial Sequence
  Description of Artificial Sequence: Synthetic peptide
RSSQSLVHSTGNTYLH

SEQ ID NO: 977 - protein, 11 aa, Artificial Sequence
  Description of Artificial Sequence: Synthetic peptide
RASQGVRTSLA

SEQ ID NO: 978 - protein, 16 aa, Artificial Sequence
  Description of Artificial Sequence: Synthetic peptide
RSSQSLVHSTGNTYLH

SEQ ID NO: 979 - protein, 16 aa, Artificial Sequence
  Description of Artificial Sequence: Synthetic peptide
RSSQSLVHSTGNTYLH

SEQ ID NO: 980 - protein, 11 aa, Artificial Sequence
  Description of Artificial Sequence: Synthetic peptide
RASQTIERRLN

SEQ ID NO: 981 - protein, 11 aa, Artificial Sequence
  Description of Artificial Sequence: Synthetic peptide
RASQTIGDYLN

SEQ ID NO: 982 - protein, 16 aa, Artificial Sequence
  Description of Artificial Sequence: Synthetic peptide
RSSQSLVHSTGNTYLH

SEQ ID NO: 983 - protein, 11 aa, Artificial Sequence
  Description of Artificial Sequence: Synthetic peptide
QGASLRNYYAS

SEQ ID NO: 984 - protein, 11 aa, Artificial Sequence
  Description of Artificial Sequence: Synthetic peptide
RASQSISNNLN

SEQ ID NO: 985 - protein, 11 aa, Artificial Sequence
  Description of Artificial Sequence: Synthetic peptide
RASQPIGPDLL

SEQ ID NO: 986 - protein, 11 aa, Artificial Sequence
  Description of Artificial Sequence: Synthetic peptide
RASQSIRRFLN

SEQ ID NO: 987 - protein, 16 aa, Artificial Sequence
  Description of Artificial Sequence: Synthetic peptide
RSSQSLVHSTGNTYLH

SEQ ID NO: 988 - protein, 16 aa, Artificial Sequence
  Description of Artificial Sequence: Synthetic peptide
RSSQSLVHSTGNTYLH

SEQ ID NO: 989 - protein, 11 aa, Artificial Sequence
  Description of Artificial Sequence: Synthetic peptide
RANQNIGNFLN

SEQ ID NO: 990 - protein, 11 aa, Artificial Sequence
  Description of Artificial Sequence: Synthetic peptide
SGNKLGDKYAS

SEQ ID NO: 991 - protein, 16 aa, Artificial Sequence
  Description of Artificial Sequence: Synthetic peptide
RSSQSLVHSTGNTYLH

SEQ ID NO: 992 - protein, 16 aa, Artificial Sequence
  Description of Artificial Sequence: Synthetic peptide
RSSQSLVHSTGNTYLH

SEQ ID NO: 993 - protein, 16 aa, Artificial Sequence
  Description of Artificial Sequence: Synthetic peptide
RSSQSLVHSTGNTYLH

SEQ ID NO: 994 - protein, 16 aa, Artificial Sequence
  Description of Artificial Sequence: Synthetic peptide
RSSQSLVHSTGNTYLH

SEQ ID NO: 995 - protein, 11 aa, Artificial Sequence
  Description of Artificial Sequence: Synthetic peptide
RASQDIGNFLN

SEQ ID NO: 996 - protein, 16 aa, Artificial Sequence
  Description of Artificial Sequence: Synthetic peptide
RSSQSLVHSTGNTYLH

SEQ ID NO: 997 - protein, 11 aa, Artificial Sequence
  Description of Artificial Sequence: Synthetic peptide
RASQGVRTSLA

SEQ ID NO: 998 - protein, 11 aa, Artificial Sequence
  Description of Artificial Sequence: Synthetic peptide
RASQSIRRYLN

SEQ ID NO: 999 - protein, 16 aa, Artificial Sequence
  Description of Artificial Sequence: Synthetic peptide
RSSQSLVHSTGNTYLH

SEQ ID NO: 1000 - protein, 11 aa, Artificial Sequence
  Description of Artificial Sequence: Synthetic peptide
RASQSIRRYLN

SEQ ID NO: 1001 - protein, 16 aa, Artificial Sequence
  Description of Artificial Sequence: Synthetic peptide
RSSQSLVHSTGNTYLH

SEQ ID NO: 1002 - protein, 16 aa, Artificial Sequence
  Description of Artificial Sequence: Synthetic peptide
RSSQSLVHSTGNTYLH

SEQ ID NO: 1003 - protein, 16 aa, Artificial Sequence
  Description of Artificial Sequence: Synthetic peptide
RSSQSLVHSTGNTYLH

SEQ ID NO: 1004 - protein, 16 aa, Artificial Sequence
  Description of Artificial Sequence: Synthetic peptide
RSSQSLVHSTGNTYLH

SEQ ID NO: 1005 - protein, 16 aa, Artificial Sequence
  Description of Artificial Sequence: Synthetic peptide
RSSQSLVHSTGNTYLH

SEQ ID NO: 1006 - protein, 11 aa, Artificial Sequence
  Description of Artificial Sequence: Synthetic peptide
RASQGVRTSLA

SEQ ID NO: 1007 - protein, 16 aa, Artificial Sequence
  Description of Artificial Sequence: Synthetic peptide
RSSQSLVHSTGNTYLH

SEQ ID NO: 1008 - protein, 11 aa, Artificial Sequence
  Description of Artificial Sequence: Synthetic peptide
RASQTIGDYLN

SEQ ID NO: 1009 - protein, 11 aa, Artificial Sequence
  Description of Artificial Sequence: Synthetic peptide
KASDHIGKFLT

SEQ ID NO: 1010 - protein, 11 aa, Artificial Sequence
  Description of Artificial Sequence: Synthetic peptide
RASQTIGDYLN

SEQ ID NO: 1011 - protein, 16 aa, Artificial Sequence
  Description of Artificial Sequence: Synthetic peptide
RSSQSLVHSTGNTYLH

SEQ ID NO: 1012 - protein, 16 aa, Artificial Sequence
  Description of Artificial Sequence: Synthetic peptide
RSSQSLVHSTGNTYLH

SEQ ID NO: 1013 - protein, 16 aa, Artificial Sequence
  Description of Artificial Sequence: Synthetic peptide
RSSQSLVHSTGNTYLH

SEQ ID NO: 1014 - protein, 16 aa, Artificial Sequence
  Description of Artificial Sequence: Synthetic peptide
RSSQSLVHSTGNTYLH

SEQ ID NO: 1015 - protein, 16 aa, Artificial Sequence
  Description of Artificial Sequence: Synthetic peptide
RSSQSLVHSTGNTYLH

SEQ ID NO: 1016 - protein, 16 aa, Artificial Sequence
  Description of Artificial Sequence: Synthetic peptide
RSSQSLVHSTGNTYLH

SEQ ID NO: 1017 - protein, 16 aa, Artificial Sequence
  Description of Artificial Sequence: Synthetic peptide
RSSQSLVHSTGNTYLH

SEQ ID NO: 1018 - protein, 16 aa, Artificial Sequence
  Description of Artificial Sequence: Synthetic peptide
RSSQSLVHSTGNTYLH

SEQ ID NO: 1019 - protein, 16 aa, Artificial Sequence
  Description of Artificial Sequence: Synthetic peptide
RSSQSLVHSTGNTYLH

SEQ ID NO: 1020 - protein, 16 aa, Artificial Sequence
  Description of Artificial Sequence: Synthetic peptide
RSSQSLVHSTGNTYLH

SEQ ID NO: 1021 - protein, 16 aa, Artificial Sequence
  Description of Artificial Sequence: Synthetic peptide
RSSQSLVHSTGNTYLH

SEQ ID NO: 1022 - protein, 16 aa, Artificial Sequence
  Description of Artificial Sequence: Synthetic peptide
RSSQSLVHSTGNTYLH

SEQ ID NO: 1023 - protein, 16 aa, Artificial Sequence
  Description of Artificial Sequence: Synthetic peptide
RSSQSLVHSTGNTYLH

SEQ ID NO: 1024 - protein, 11 aa, Artificial Sequence
  Description of Artificial Sequence: Synthetic peptide
RASQNIRSYLN

SEQ ID NO: 1025 - protein, 16 aa, Artificial Sequence
  Description of Artificial Sequence: Synthetic peptide
RSSQSLVHSTGNTYLH

SEQ ID NO: 1026 - protein, 16 aa, Artificial Sequence
  Description of Artificial Sequence: Synthetic peptide
RSSQSLVHSTGNTYLH

SEQ ID NO: 1027 - protein, 11 aa, Artificial Sequence
  Description of Artificial Sequence: Synthetic peptide
RASHNINSYLN

SEQ ID NO: 1028 - protein, 16 aa, Artificial Sequence
  Description of Artificial Sequence: Synthetic peptide
RSSQSLVHSTGNTYLH

SEQ ID NO: 1029 - protein, 16 aa, Artificial Sequence
  Description of Artificial Sequence: Synthetic peptide
RSSQSLVHSTGNTYLH

SEQ ID NO: 1030 - protein, 16 aa, Artificial Sequence
  Description of Artificial Sequence: Synthetic peptide
RSSQSLVHSTGNTYLH

SEQ ID NO: 1031 - protein, 16 aa, Artificial Sequence
  Description of Artificial Sequence: Synthetic peptide
RSSQSLVHSTGNTYLH

SEQ ID NO: 1032 - protein, 11 aa, Artificial Sequence
  Description of Artificial Sequence: Synthetic peptide
RASQSVRSYLN

SEQ ID NO: 1033 - protein, 16 aa, Artificial Sequence
  Description of Artificial Sequence: Synthetic peptide
RSSQSLVHSTGNTYLH

SEQ ID NO: 1034 - protein, 11 aa, Artificial Sequence
  Description of Artificial Sequence: Synthetic peptide
RASQSVRSYLN

SEQ ID NO: 1035 - protein, 11 aa, Artificial Sequence
  Description of Artificial Sequence: Synthetic peptide
RASQGVRTSLA

SEQ ID NO: 1036 - protein, 16 aa, Artificial Sequence
  Description of Artificial Sequence: Synthetic peptide
RSSQSLVHSTGNTYLH

SEQ ID NO: 1037 - protein, 16 aa, Artificial Sequence
  Description of Artificial Sequence: Synthetic peptide
RSSQSLVHSTGNTYLH

SEQ ID NO: 1038 - protein, 11 aa, Artificial Sequence
  Description of Artificial Sequence: Synthetic peptide
SGDKLGDKYTS

SEQ ID NO: 1039 - protein, 11 aa, Artificial Sequence
  Description of Artificial Sequence: Synthetic peptide
SGDKLGHTYTS

SEQ ID NO: 1040 - protein, 16 aa, Artificial Sequence
  Description of Artificial Sequence: Synthetic peptide
RSSQSLVHSTGNTYLH

SEQ ID NO: 1041 - protein, 16 aa, Artificial Sequence
  Description of Artificial Sequence: Synthetic peptide
RSSQSLVHSTGNTYLH

SEQ ID NO: 1042 - protein, 11 aa, Artificial Sequence
  Description of Artificial Sequence: Synthetic peptide
RASQTIGDYLN

SEQ ID NO: 1043 - protein, 16 aa, Artificial Sequence
  Description of Artificial Sequence: Synthetic peptide
RSSQSLVHSTGNTYLH

SEQ ID NO: 1044 - protein, 16 aa, Artificial Sequence
  Description of Artificial Sequence: Synthetic peptide
RSSQSLVHSTGNTYLH

SEQ ID NO: 1045 - protein, 11 aa, Artificial Sequence
  Description of Artificial Sequence: Synthetic peptide
SGDRLGEKYVS

SEQ ID NO: 1046 - protein, 11 aa, Artificial Sequence
  Description of Artificial Sequence: Synthetic peptide
RASQSIREYLH

SEQ ID NO: 1047 - protein, 16 aa, Artificial Sequence
  Description of Artificial Sequence: Synthetic peptide
RSSQSLVHSTGNTYLH

SEQ ID NO: 1048 - protein, 11 aa, Artificial Sequence
  Description of Artificial Sequence: Synthetic peptide
SASQDINKYLN

SEQ ID NO: 1049 - protein, 16 aa, Artificial Sequence
  Description of Artificial Sequence: Synthetic peptide
RSSQSLVHSTGNTYLH

SEQ ID NO: 1050 - protein, 11 aa, Artificial Sequence
  Description of Artificial Sequence: Synthetic peptide
RASQGVRTSLA

SEQ ID NO: 1051 - protein, 16 aa, Artificial Sequence
  Description of Artificial Sequence: Synthetic peptide
RSSQSLVHSTGNTYLH

SEQ ID NO: 1052 - protein, 16 aa, Artificial Sequence
  Description of Artificial Sequence: Synthetic peptide
RSSQSLVHSTGNTYLH

SEQ ID NO: 1053 - protein, 11 aa, Artificial Sequence
  Description of Artificial Sequence: Synthetic peptide
RASHFIGSLLS

SEQ ID NO: 1054 - protein, 16 aa, Artificial Sequence
  Description of Artificial Sequence: Synthetic peptide
RSSQSLVHSTGNTYLH

SEQ ID NO: 1055 - protein, 16 aa, Artificial Sequence
  Description of Artificial Sequence: Synthetic peptide
RSSQSLVHSTGNTYLH

SEQ ID NO: 1056 - protein, 16 aa, Artificial Sequence
  Description of Artificial Sequence: Synthetic peptide
RSSQSLVHSTGNTYLH

SEQ ID NO: 1057 - protein, 11 aa, Artificial Sequence
  Description of Artificial Sequence: Synthetic peptide
RASQSISNNLN

SEQ ID NO: 1058 - protein, 16 aa, Artificial Sequence
  Description of Artificial Sequence: Synthetic peptide
RSSQSLVHSTGNTYLH

SEQ ID NO: 1059 - protein, 11 aa, Artificial Sequence
  Description of Artificial Sequence: Synthetic peptide
RASQSISNNLN

SEQ ID NO: 1060 - protein, 16 aa, Artificial Sequence
  Description of Artificial Sequence: Synthetic peptide
RSSQSLVHSTGNTYLH

SEQ ID NO: 1061 - protein, 16 aa, Artificial Sequence
  Description of Artificial Sequence: Synthetic peptide
RSSQSLVHSTGNTYLH

SEQ ID NO: 1062 - protein, 16 aa, Artificial Sequence
  Description of Artificial Sequence: Synthetic peptide
RSSQSLVHSTGNTYLH

SEQ ID NO: 1063 - protein, 16 aa, Artificial Sequence
  Description of Artificial Sequence: Synthetic peptide
RSSQSLVHSTGNTYLH

SEQ ID NO: 1064 - protein, 16 aa, Artificial Sequence
  Description of Artificial Sequence: Synthetic peptide
RSSQSLVHSTGNTYLH

SEQ ID NO: 1065 - protein, 11 aa, Artificial Sequence
  Description of Artificial Sequence: Synthetic peptide
RASQTIERRLN

SEQ ID NO: 1066 - protein, 11 aa, Artificial Sequence
  Description of Artificial Sequence: Synthetic peptide
SGDNLRGYYAS

SEQ ID NO: 1067 - protein, 16 aa, Artificial Sequence
  Description of Artificial Sequence: Synthetic peptide
RSSQSLVHSTGNTYLH

SEQ ID NO: 1068 - protein, 11 aa, Artificial Sequence
  Description of Artificial Sequence: Synthetic peptide
SGDKLGHTYTS

SEQ ID NO: 1069 - protein, 11 aa, Artificial Sequence
  Description of Artificial Sequence: Synthetic peptide
RASQSISNNLN

SEQ ID NO: 1070 - protein, 16 aa, Artificial Sequence
  Description of Artificial Sequence: Synthetic peptide
RSSQSLVHSTGNTYLH

SEQ ID NO: 1071 - protein, 11 aa, Artificial Sequence
  Description of Artificial Sequence: Synthetic peptide
RASQTIERRLN

SEQ ID NO: 1072 - protein, 12 aa, Artificial Sequence
  Description of Artificial Sequence: Synthetic peptide
RASQSVSSGYLA

SEQ ID NO: 1073 - protein, 11 aa, Artificial Sequence
  Description of Artificial Sequence: Synthetic peptide
RASQSINTFLN

SEQ ID NO: 1074 - protein, 11 aa, Artificial Sequence
  Description of Artificial Sequence: Synthetic peptide
RASQSVSSYLN

SEQ ID NO: 1075 - protein, 11 aa, Artificial Sequence
  Description of Artificial Sequence: Synthetic peptide
RASQSIRTYLN

SEQ ID NO: 1076 - protein, 12 aa, Artificial Sequence
  Description of Artificial Sequence: Synthetic peptide
RASQSVSSGYLA

SEQ ID NO: 1077 - protein, 11 aa, Artificial Sequence
  Description of Artificial Sequence: Synthetic peptide
RASQHIGKYLN

SEQ ID NO: 1078 - protein, 11 aa, Artificial Sequence
  Description of Artificial Sequence: Synthetic peptide
RASQSIGGYLN

SEQ ID NO: 1079 - protein, 11 aa, Artificial Sequence
  Description of Artificial Sequence: Synthetic peptide
RASQSINTFLN

SEQ ID NO: 1080 - protein, 11 aa, Artificial Sequence
  Description of Artificial Sequence: Synthetic peptide
RASQNIGKYLN

SEQ ID NO: 1081 - protein, 11 aa, Artificial Sequence
  Description of Artificial Sequence: Synthetic peptide
RASQNIRNYLN

SEQ ID NO: 1082 - protein, 11 aa, Artificial Sequence
  Description of Artificial Sequence: Synthetic peptide
RASQSIKNYLN

SEQ ID NO: 1083 - protein, 11 aa, Artificial Sequence
  Description of Artificial Sequence: Synthetic peptide
RASQSINTFLN

SEQ ID NO: 1084 - protein, 11 aa, Artificial Sequence
  Description of Artificial Sequence: Synthetic peptide
RASQSITRYLN

SEQ ID NO: 1085 - protein, 11 aa, Artificial Sequence
  Description of Artificial Sequence: Synthetic peptide
RASEKISTYLN

SEQ ID NO: 1086 - protein, 12 aa, Artificial Sequence
  Description of Artificial Sequence: Synthetic peptide
RASQSVNSNHLA

SEQ ID NO: 1087 - protein, 11 aa, Artificial Sequence
  Description of Artificial Sequence: Synthetic peptide
RASQSISNYLN

SEQ ID NO: 1088 - protein, 11 aa, Artificial Sequence
  Description of Artificial Sequence: Synthetic peptide
RASQSITRYLN

SEQ ID NO: 1089 - protein, 11 aa, Artificial Sequence
  Description of Artificial Sequence: Synthetic peptide
RASQSVGSYLN

SEQ ID NO: 1090 - protein, 12 aa, Artificial Sequence
  Description of Artificial Sequence: Synthetic peptide
RASHSVSNNYLA

SEQ ID NO: 1091 - protein, 11 aa, Artificial Sequence
  Description of Artificial Sequence: Synthetic peptide
RASQSINTFLN

SEQ ID NO: 1092 - protein, 12 aa, Artificial Sequence
  Description of Artificial Sequence: Synthetic peptide
RASQSVSGTYLA

SEQ ID NO: 1093 - protein, 7 aa, Artificial Sequence
  Description of Artificial Sequence: Synthetic peptide
AASDLES

SEQ ID NO: 1094 - protein, 7 aa, Artificial Sequence
  Description of Artificial Sequence: Synthetic peptide
PKHNRPP

SEQ ID NO: 1095 - protein, 7 aa, Artificial Sequence
  Description of Artificial Sequence: Synthetic peptide
AASDLES

SEQ ID NO: 1096 - protein, 7 aa, Artificial Sequence
  Description of Artificial Sequence: Synthetic peptide
AASDLES

SEQ ID NO: 1097 - protein, 7 aa, Artificial Sequence
  Description of Artificial Sequence: Synthetic peptide
AASDLES

SEQ ID NO: 1098 - protein, 7 aa, Artificial Sequence
  Description of Artificial Sequence: Synthetic peptide
AASDLES

SEQ ID NO: 1099 - protein, 7 aa, Artificial Sequence
  Description of Artificial Sequence: Synthetic peptide
GQHNRPS

SEQ ID NO: 1100 - protein, 7 aa, Artificial Sequence
  Description of Artificial Sequence: Synthetic peptide
AASDLES

SEQ ID NO: 1101 - protein, 7 aa, Artificial Sequence
  Description of Artificial Sequence: Synthetic peptide
AASDLES

SEQ ID NO: 1102 - protein, 7 aa, Artificial Sequence
  Description of Artificial Sequence: Synthetic peptide
AASDLES

SEQ ID NO: 1103 - protein, 7 aa, Artificial Sequence
  Description of Artificial Sequence: Synthetic peptide
AASDLES

SEQ ID NO: 1104 - protein, 7 aa, Artificial Sequence
  Description of Artificial Sequence: Synthetic peptide
YTSSLHS

SEQ ID NO: 1105 - protein, 7 aa, Artificial Sequence
  Description of Artificial Sequence: Synthetic peptide
FGSELRK

SEQ ID NO: 1106 - protein, 7 aa, Artificial Sequence
  Description of Artificial Sequence: Synthetic peptide
QNDKRPS

SEQ ID NO: 1107 - protein, 7 aa, Artificial Sequence
  Description of Artificial Sequence: Synthetic peptide
GTSYRYS

SEQ ID NO: 1108 - protein, 7 aa, Artificial Sequence
  Description of Artificial Sequence: Synthetic peptide
RTSWLQS

SEQ ID NO: 1109 - protein, 7 aa, Artificial Sequence
  Description of Artificial Sequence: Synthetic peptide
QNDKRPS

SEQ ID NO: 1110 - protein, 7 aa, Artificial Sequence
  Description of Artificial Sequence: Synthetic peptide
HTSRLQD

SEQ ID NO: 1111 - protein, 7 aa, Artificial Sequence
  Description of Artificial Sequence: Synthetic peptide
AASDLES

SEQ ID NO: 1112 - protein, 7 aa, Artificial Sequence
  Description of Artificial Sequence: Synthetic peptide
AASDLES

SEQ ID NO: 1113 - protein, 7 aa, Artificial Sequence
  Description of Artificial Sequence: Synthetic peptide
AASDLES

SEQ ID NO: 1114 - protein, 7 aa, Artificial Sequence
  Description of Artificial Sequence: Synthetic peptide
AKNNRPS

SEQ ID NO: 1115 - protein, 7 aa, Artificial Sequence
  Description of Artificial Sequence: Synthetic peptide
AASDLES

SEQ ID NO: 1116 - protein, 7 aa, Artificial Sequence
  Description of Artificial Sequence: Synthetic peptide
AASDLES

SEQ ID NO: 1117 - protein, 7 aa, Artificial Sequence
  Description of Artificial Sequence: Synthetic peptide
AKNNRPS

SEQ ID NO: 1118 - protein, 7 aa, Artificial Sequence
  Description of Artificial Sequence: Synthetic peptide
GASSRAT

SEQ ID NO: 1119 - protein, 7 aa, Artificial Sequence
  Description of Artificial Sequence: Synthetic peptide
AASDLES

SEQ ID NO: 1120 - protein, 7 aa, Artificial Sequence
  Description of Artificial Sequence: Synthetic peptide
DTSKVAS

SEQ ID NO: 1121 - protein, 7 aa, Artificial Sequence
  Description of Artificial Sequence: Synthetic peptide
AKNNRPS

SEQ ID NO: 1122 - protein, 7 aa, Artificial Sequence
  Description of Artificial Sequence: Synthetic peptide
RKSNRPS

SEQ ID NO: 1123 - protein, 7 aa, Artificial Sequence
  Description of Artificial Sequence: Synthetic peptide
WASDRES

SEQ ID NO: 1124 - protein, 7 aa, Artificial Sequence
  Description of Artificial Sequence: Synthetic peptide
AASDLES

SEQ ID NO: 1125 - protein, 7 aa, Artificial Sequence
  Description of Artificial Sequence: Synthetic peptide
AASDLES

SEQ ID NO: 1126 - protein, 7 aa, Artificial Sequence
  Description of Artificial Sequence: Synthetic peptide
QDFKRPS

SEQ ID NO: 1127 - protein, 7 aa, Artificial Sequence
  Description of Artificial Sequence: Synthetic peptide
RTSWLQS

SEQ ID NO: 1128 - protein, 7 aa, Artificial Sequence
  Description of Artificial Sequence: Synthetic peptide
AASDLES

SEQ ID NO: 1129 - protein, 7 aa, Artificial Sequence
  Description of Artificial Sequence: Synthetic peptide
AASDLES

SEQ ID NO: 1130 - protein, 7 aa, Artificial Sequence
  Description of Artificial Sequence: Synthetic peptide
AASDLES

SEQ ID NO: 1131 - protein, 7 aa, Artificial Sequence
  Description of Artificial Sequence: Synthetic peptide
AASDLES

SEQ ID NO: 1132 - protein, 7 aa, Artificial Sequence
  Description of Artificial Sequence: Synthetic peptide
RTSWLQS

SEQ ID NO: 1133 - protein, 7 aa, Artificial Sequence
  Description of Artificial Sequence: Synthetic peptide
AASDLES

SEQ ID NO: 1134 - protein, 7 aa, Artificial Sequence
  Description of Artificial Sequence: Synthetic peptide
GKNIRPS

SEQ ID NO: 1135 - protein, 7 aa, Artificial Sequence
  Description of Artificial Sequence: Synthetic peptide
WASDRES

SEQ ID NO: 1136 - protein, 7 aa, Artificial Sequence
  Description of Artificial Sequence: Synthetic peptide
AASDLES

SEQ ID NO: 1137 - protein, 7 aa, Artificial Sequence
  Description of Artificial Sequence: Synthetic peptide
DASNLQS

SEQ ID NO: 1138 - protein, 7 aa, Artificial Sequence
  Description of Artificial Sequence: Synthetic peptide
AASDLES

SEQ ID NO: 1139 - protein, 7 aa, Artificial Sequence
  Description of Artificial Sequence: Synthetic peptide
AASDLES

SEQ ID NO: 1140 - protein, 7 aa, Artificial Sequence
  Description of Artificial Sequence: Synthetic peptide
AASDLES

SEQ ID NO: 1141 - protein, 7 aa, Artificial Sequence
  Description of Artificial Sequence: Synthetic peptide
AASDLES

SEQ ID NO: 1142 - protein, 7 aa, Artificial Sequence
  Description of Artificial Sequence: Synthetic peptide
AASDLES

SEQ ID NO: 1143 - protein, 7 aa, Artificial Sequence
  Description of Artificial Sequence: Synthetic peptide
AKNNRPS

SEQ ID NO: 1144 - protein, 7 aa, Artificial Sequence
  Description of Artificial Sequence: Synthetic peptide
AASDLES

SEQ ID NO: 1145 - protein, 7 aa, Artificial Sequence
  Description of Artificial Sequence: Synthetic peptide
GQHNRPS

SEQ ID NO: 1146 - protein, 7 aa, Artificial Sequence
  Description of Artificial Sequence: Synthetic peptide
AASKLAS

SEQ ID NO: 1147 - protein, 7 aa, Artificial Sequence
  Description of Artificial Sequence: Synthetic peptide
HDNKRPS

SEQ ID NO: 1148 - protein, 7 aa, Artificial Sequence
  Description of Artificial Sequence: Synthetic peptide
AASDLES

SEQ ID NO: 1149 - protein, 7 aa, Artificial Sequence
  Description of Artificial Sequence: Synthetic peptide
GKNIRPS

SEQ ID NO: 1150 - protein, 7 aa, Artificial Sequence
  Description of Artificial Sequence: Synthetic peptide
AASDLES

SEQ ID NO: 1151 - protein, 7 aa, Artificial Sequence
  Description of Artificial Sequence: Synthetic peptide
AASDLES

SEQ ID NO: 1152 - protein, 7 aa, Artificial Sequence
  Description of Artificial Sequence: Synthetic peptide
AASDLES

SEQ ID NO: 1153 - protein, 7 aa, Artificial Sequence
  Description of Artificial Sequence: Synthetic peptide
AASDLES

SEQ ID NO: 1154 - protein, 7 aa, Artificial Sequence
  Description of Artificial Sequence: Synthetic peptide
AASDLES

SEQ ID NO: 1155 - protein, 7 aa, Artificial Sequence
  Description of Artificial Sequence: Synthetic peptide
AASDLES

SEQ ID NO: 1156 - protein, 7 aa, Artificial Sequence
  Description of Artificial Sequence: Synthetic peptide
AASDLES

SEQ ID NO: 1157 - protein, 7 aa, Artificial Sequence
  Description of Artificial Sequence: Synthetic peptide
AASDLES

SEQ ID NO: 1158 - protein, 7 aa, Artificial Sequence
  Description of Artificial Sequence: Synthetic peptide
AASDLES

SEQ ID NO: 1159 - protein, 7 aa, Artificial Sequence
  Description of Artificial Sequence: Synthetic peptide
AASDLES

SEQ ID NO: 1160 - protein, 7 aa, Artificial Sequence
  Description of Artificial Sequence: Synthetic peptide
AASDLES

SEQ ID NO: 1161 - protein, 7 aa, Artificial Sequence
  Description of Artificial Sequence: Synthetic peptide
GASTLQS

SEQ ID NO: 1162 - protein, 7 aa, Artificial Sequence
  Description of Artificial Sequence: Synthetic peptide
AASDLES

SEQ ID NO: 1163 - protein, 7 aa, Artificial Sequence
  Description of Artificial Sequence: Synthetic peptide
AASDLES

SEQ ID NO: 1164 - protein, 7 aa, Artificial Sequence
  Description of Artificial Sequence: Synthetic peptide
GKNIRPS

SEQ ID NO: 1165 - protein, 7 aa, Artificial Sequence
  Description of Artificial Sequence: Synthetic peptide
AASDLES

SEQ ID NO: 1166 - protein, 7 aa, Artificial Sequence
  Description of Artificial Sequence: Synthetic peptide
AASDLES

SEQ ID NO: 1167 - protein, 7 aa, Artificial Sequence
  Description of Artificial Sequence: Synthetic peptide
AASDLES

SEQ ID NO: 1168 - protein, 7 aa, Artificial Sequence
  Description of Artificial Sequence: Synthetic peptide
AASDLES

SEQ ID NO: 1169 - protein, 7 aa, Artificial Sequence
  Description of Artificial Sequence: Synthetic peptide
AASSLYS

SEQ ID NO: 1170 - protein, 7 aa, Artificial Sequence
  Description of Artificial Sequence: Synthetic peptide
AASDLES

SEQ ID NO: 1171 - protein, 7 aa, Artificial Sequence
  Description of Artificial Sequence: Synthetic peptide
AATTLQS

SEQ ID NO: 1172 - protein, 7 aa, Artificial Sequence
  Description of Artificial Sequence: Synthetic peptide
GKNIRPS

SEQ ID NO: 1173 - protein, 7 aa, Artificial Sequence
  Description of Artificial Sequence: Synthetic peptide
AASDLES

SEQ ID NO: 1174 - protein, 7 aa, Artificial Sequence
  Description of Artificial Sequence: Synthetic peptide
AASDLES

SEQ ID NO: 1175 - protein, 7 aa, Artificial Sequence
  Description of Artificial Sequence: Synthetic peptide
GASSRAT

SEQ ID NO: 1176 - protein, 7 aa, Artificial Sequence
  Description of Artificial Sequence: Synthetic peptide
YTSSLHS

SEQ ID NO: 1177 - protein, 7 aa, Artificial Sequence
  Description of Artificial Sequence: Synthetic peptide
AASDLES

SEQ ID NO: 1178 - protein, 7 aa, Artificial Sequence
  Description of Artificial Sequence: Synthetic peptide
AASDLES

SEQ ID NO: 1179 - protein, 7 aa, Artificial Sequence
  Description of Artificial Sequence: Synthetic peptide
QDFKRPS

SEQ ID NO: 1180 - protein, 7 aa, Artificial Sequence
  Description of Artificial Sequence: Synthetic peptide
AASDLES

SEQ ID NO: 1181 - protein, 7 aa, Artificial Sequence
  Description of Artificial Sequence: Synthetic peptide
AASDLES

SEQ ID NO: 1182 - protein, 7 aa, Artificial Sequence
  Description of Artificial Sequence: Synthetic peptide
GTTSLES

SEQ ID NO: 1183 - protein, 7 aa, Artificial Sequence
  Description of Artificial Sequence: Synthetic peptide
FGSELRK

SEQ ID NO: 1184 - protein, 7 aa, Artificial Sequence
  Description of Artificial Sequence: Synthetic peptide
AASDLES

SEQ ID NO: 1185 - protein, 7 aa, Artificial Sequence
  Description of Artificial Sequence: Synthetic peptide
HTSRLQS

SEQ ID NO: 1186 - protein, 7 aa, Artificial Sequence
  Description of Artificial Sequence: Synthetic peptide
AASDLES

SEQ ID NO: 1187 - protein, 7 aa, Artificial Sequence
  Description of Artificial Sequence: Synthetic peptide
AKNNRPS

SEQ ID NO: 1188 - protein, 7 aa, Artificial Sequence
  Description of Artificial Sequence: Synthetic peptide
AASDLES

SEQ ID NO: 1189 - protein, 7 aa, Artificial Sequence
  Description of Artificial Sequence: Synthetic peptide
AASDLES

SEQ ID NO: 1190 - protein, 7 aa, Artificial Sequence
  Description of Artificial Sequence: Synthetic peptide
ETSKLAS

SEQ ID NO: 1191 - protein, 7 aa, Artificial Sequence
  Description of Artificial Sequence: Synthetic peptide
AASDLES

SEQ ID NO: 1192 - protein, 7 aa, Artificial Sequence
  Description of Artificial Sequence: Synthetic peptide
AASDLES

SEQ ID NO: 1193 - protein, 7 aa, Artificial Sequence
  Description of Artificial Sequence: Synthetic peptide
AASDLES

SEQ ID NO: 1194 - protein, 7 aa, Artificial Sequence
  Description of Artificial Sequence: Synthetic peptide
AKNNRPS

SEQ ID NO: 1195 - protein, 7 aa, Artificial Sequence
  Description of Artificial Sequence: Synthetic peptide
AASDLES

SEQ ID NO: 1196 - protein, 7 aa, Artificial Sequence
  Description of Artificial Sequence: Synthetic peptide
DASSSQS

SEQ ID NO: 1197 - protein, 7 aa, Artificial Sequence
  Description of Artificial Sequence: Synthetic peptide
AASDLES

SEQ ID NO: 1198 - protein, 7 aa, Artificial Sequence
  Description of Artificial Sequence: Synthetic peptide
AASDLES

SEQ ID NO: 1199 - protein, 7 aa, Artificial Sequence
  Description of Artificial Sequence: Synthetic peptide
AASDLES

SEQ ID NO: 1200 - protein, 7 aa, Artificial Sequence
  Description of Artificial Sequence: Synthetic peptide
AASDLES

SEQ ID NO: 1201 - protein, 7 aa, Artificial Sequence
  Description of Artificial Sequence: Synthetic peptide
AASDLES

SEQ ID NO: 1202 - protein, 7 aa, Artificial Sequence
  Description of Artificial Sequence: Synthetic peptide
GTTSLES

SEQ ID NO: 1203 - protein, 7 aa, Artificial Sequence
  Description of Artificial Sequence: Synthetic peptide
GTSYRYS

SEQ ID NO: 1204 - protein, 7 aa, Artificial Sequence
  Description of Artificial Sequence: Synthetic peptide
AASDLES

SEQ ID NO: 1205 - protein, 7 aa, Artificial Sequence
  Description of Artificial Sequence: Synthetic peptide
GKNIRPS

SEQ ID NO: 1206 - protein, 7 aa, Artificial Sequence
  Description of Artificial Sequence: Synthetic peptide
TASNLQN

SEQ ID NO: 1207 - protein, 7 aa, Artificial Sequence
  Description of Artificial Sequence: Synthetic peptide
AASDLES

SEQ ID NO: 1208 - protein, 7 aa, Artificial Sequence
  Description of Artificial Sequence: Synthetic peptide
HDNKRPS

SEQ ID NO: 1209 - protein, 7 aa, Artificial Sequence
  Description of Artificial Sequence: Synthetic peptide
STSSRAT

SEQ ID NO: 1210 - protein, 7 aa, Artificial Sequence
  Description of Artificial Sequence: Synthetic peptide
GASSLQS

SEQ ID NO: 1211 - protein, 7 aa, Artificial Sequence
  Description of Artificial Sequence: Synthetic peptide
AATSLQS

SEQ ID NO: 1212 - protein, 7 aa, Artificial Sequence
  Description of Artificial Sequence: Synthetic peptide
GASSLQS

SEQ ID NO: 1213 - protein, 7 aa, Artificial Sequence
  Description of Artificial Sequence: Synthetic peptide
DASSRAT

SEQ ID NO: 1214 - protein, 7 aa, Artificial Sequence
  Description of Artificial Sequence: Synthetic peptide
GASSLQS

SEQ ID NO: 1215 - protein, 7 aa, Artificial Sequence
  Description of Artificial Sequence: Synthetic peptide
AVSSLQS

SEQ ID NO: 1216 - protein, 7 aa, Artificial Sequence
  Description of Artificial Sequence: Synthetic peptide
GASSLQS

SEQ ID NO: 1217 - protein, 7 aa, Artificial Sequence
  Description of Artificial Sequence: Synthetic peptide
AASSLQS

SEQ ID NO: 1218 - protein, 7 aa, Artificial Sequence
  Description of Artificial Sequence: Synthetic peptide
GASSLQS

SEQ ID NO: 1219 - protein, 7 aa, Artificial Sequence
  Description of Artificial Sequence: Synthetic peptide
TASSLQS

SEQ ID NO: 1220 - protein, 7 aa, Artificial Sequence
  Description of Artificial Sequence: Synthetic peptide
GASSLQS

SEQ ID NO: 1221 - protein, 7 aa, Artificial Sequence
  Description of Artificial Sequence: Synthetic peptide
TTSSLQS

SEQ ID NO: 1222 - protein, 7 aa, Artificial Sequence
  Description of Artificial Sequence: Synthetic peptide
AASSLQS

SEQ ID NO: 1223 - protein, 7 aa, Artificial Sequence
  Description of Artificial Sequence: Synthetic peptide
STSSRAT

SEQ ID NO: 1224 - protein, 7 aa, Artificial Sequence
  Description of Artificial Sequence: Synthetic peptide
GATSLQS

SEQ ID NO: 1225 - protein, 7 aa, Artificial Sequence
  Description of Artificial Sequence: Synthetic peptide
GASSLQS

SEQ ID NO: 1226 - protein, 7 aa, Artificial Sequence
  Description of Artificial Sequence: Synthetic peptide
SASSLQS

SEQ ID NO: 1227 - protein, 7 aa, Artificial Sequence
  Description of Artificial Sequence: Synthetic peptide
GASSRAT

SEQ ID NO: 1228 - protein, 7 aa, Artificial Sequence
  Description of Artificial Sequence: Synthetic peptide
GASSLQS

SEQ ID NO: 1229 - protein, 7 aa, Artificial Sequence
  Description of Artificial Sequence: Synthetic peptide
GASSRAT

SEQ ID NO: 1230 - protein, 11 aa, Artificial Sequence
  Description of Artificial Sequence: Synthetic peptide
CQQGHTLPWTF

SEQ ID NO: 1231 - protein, 11 aa, Artificial Sequence [sequence omitted]

SEQ ID NO: 1232 - protein, 11 aa, Artificial Sequence
  Description of Artificial Sequence: Synthetic peptide
CQQGHTLPWTF

SEQ ID NO: 1233 - protein, 11 aa, Artificial Sequence
  Description of Artificial Sequence: Synthetic peptide
CQQGHTLPWTF

SEQ ID NO: 1234 - protein, 11 aa, Artificial Sequence
  Description of Artificial Sequence: Synthetic peptide
CQQGHTLPWTF

SEQ ID NO: 1235 - protein, 11 aa, Artificial Sequence
  Description of Artificial Sequence: Synthetic peptide
CQQGHTLPWTF

SEQ ID NO: 1236 - protein, 15 aa, Artificial Sequence
  Description of Artificial Sequence: Synthetic peptide
CQGSYYSGSGWYYAF

SEQ ID NO: 1237 - protein, 11 aa, Artificial Sequence
  Description of Artificial Sequence: Synthetic peptide
CQQGHTLPWTF

SEQ ID NO: 1238 - protein, 11 aa, Artificial Sequence
  Description of Artificial Sequence: Synthetic peptide
CQQGHTLPWTF

SEQ ID NO: 1239 - protein, 11 aa, Artificial Sequence
  Description of Artificial Sequence: Synthetic peptide
CQQGHTLPWTF

SEQ ID NO: 1240 - protein, 11 aa, Artificial Sequence
  Description of Artificial Sequence: Synthetic peptide
CQQGHTLPWTF

SEQ ID NO: 1241 - protein, 14 aa, Artificial Sequence
  Description of Artificial Sequence: Synthetic peptide
CATRAVRGNPHVLF

SEQ ID NO: 1242 - protein, 11 aa, Artificial Sequence
  Description of Artificial Sequence: Synthetic peptide
CGQGVLWPATF

SEQ ID NO: 1243 - protein, 10 aa, Artificial Sequence
  Description of Artificial Sequence: Synthetic peptide
CHQWSSYPTF

SEQ ID NO: 1244 - protein, 13 aa, Artificial Sequence
  Description of Artificial Sequence: Synthetic peptide
CSSWAGSRSGTVF

SEQ ID NO: 1245 - protein, 11 aa, Artificial Sequence [sequence omitted]

SEQ ID NO: 1246 - protein, 11 aa, Artificial Sequence [sequence omitted]

SEQ ID NO: 1247 - protein, 11 aa, Artificial Sequence [sequence omitted]

SEQ ID NO: 1248 - protein, 11 aa, Artificial Sequence
  Description of Artificial Sequence: Synthetic peptide
CQQGHTLPWTF

SEQ ID NO: 1249 - protein, 11 aa, Artificial Sequence
  Description of Artificial Sequence: Synthetic peptide
CQQGHTLPWTF

SEQ ID NO: 1250 - protein, 11 aa, Artificial Sequence
  Description of Artificial Sequence: Synthetic peptide
CQQGHTLPWTF

SEQ ID NO: 1251 - protein, 11 aa, Artificial Sequence
  Description of Artificial Sequence: Synthetic peptide
CQQSYHTPQTF

SEQ ID NO: 1252 - protein, 11 aa, Artificial Sequence
  Description of Artificial Sequence: Synthetic peptide
CQQGHTLPWTF

SEQ ID NO: 1253 - protein, 11 aa, Artificial Sequence
  Description of Artificial Sequence: Synthetic peptide
CQQGHTLPWTF

SEQ ID NO: 1254 - protein, 11 aa, Artificial Sequence
  Description of Artificial Sequence: Synthetic peptide
CQQTALVPYTF

SEQ ID NO: 1255 - protein, 11 aa, Artificial Sequence
  Description of Artificial Sequence: Synthetic peptide
CAQGAALPRTF

SEQ ID NO: 1256 - protein, 11 aa, Artificial Sequence
  Description of Artificial Sequence: Synthetic peptide
CQQGHTLPWTF

SEQ ID NO: 1257 - protein, 11 aa, Artificial Sequence
  Description of Artificial Sequence: Synthetic peptide
CFQGSHIPYTF

SEQ ID NO: 1258 - protein, 11 aa, Artificial Sequence [sequence omitted]

SEQ ID NO: 1259 - protein, 11 aa, Artificial Sequence [sequence omitted]

SEQ ID NO: 1260 - protein, 11 aa, Artificial Sequence
  Description of Artificial Sequence: Synthetic peptide
CQQTATWPFTF

SEQ ID NO: 1261 - protein, 11 aa, Artificial Sequence
  Description of Artificial Sequence: Synthetic peptide
CQQGHTLPWTF

SEQ ID NO: 1262 - protein, 11 aa, Artificial Sequence
  Description of Artificial Sequence: Synthetic peptide
CQQGHTLPWTF

SEQ ID NO: 1263 - protein, 11 aa, Artificial Sequence
  Description of Artificial Sequence: Synthetic peptide
CHQRSSYPWTF

SEQ ID NO: 1264 - protein, 14 aa, Artificial Sequence
  Description of Artificial Sequence: Synthetic peptide
CVARAVRGNPHVLF

SEQ ID NO: 1265 - protein, 11 aa, Artificial Sequence
  Description of Artificial Sequence: Synthetic peptide
CQQGHTLPWTF

SEQ ID NO: 1266 - protein, 11 aa, Artificial Sequence
  Description of Artificial Sequence: Synthetic peptide
CQQGHTLPWTF

SEQ ID NO: 1267 - protein, 11 aa, Artificial Sequence
  Description of Artificial Sequence: Synthetic peptide
CQQGHTLPWTF

SEQ ID NO: 1268 - protein, 11 aa, Artificial Sequence
  Description of Artificial Sequence: Synthetic peptide
CQQGHTLPWTF

SEQ ID NO: 1269 - protein, 11 aa, Artificial Sequence
  Description of Artificial Sequence: Synthetic peptide
CQQRSSYPPTF

SEQ ID NO: 1270 - protein, 11 aa, Artificial Sequence
  Description of Artificial Sequence: Synthetic peptide
CQQGHTLPWTF

SEQ ID NO: 1271 - protein, 11 aa, Artificial Sequence [sequence omitted]

SEQ ID NO: 1272 - protein, 11 aa, Artificial Sequence [sequence omitted]

SEQ ID NO: 1273 - protein, 11 aa, Artificial Sequence
  Description of Artificial Sequence: Synthetic peptide
CQQGHTLPWTF

SEQ ID NO: 1274 - protein, 11 aa, Artificial Sequence [sequence omitted]

SEQ ID NO: 1275 - protein, 11 aa, Artificial Sequence
  Description of Artificial Sequence: Synthetic peptide
CQQGHTLPWTF

SEQ ID NO: 1276 - protein, 11 aa, Artificial Sequence
  Description of Artificial Sequence: Synthetic peptide
CQQGHTLPWTF

SEQ ID NO: 1277 - protein, 11 aa, Artificial Sequence
  Description of Artificial Sequence: Synthetic peptide
CQQGHTLPWTF

SEQ ID NO: 1278 - protein, 11 aa, Artificial Sequence
  Description of Artificial Sequence: Synthetic peptide
CQQGHTLPWTF

SEQ ID NO: 1279 - protein, 11 aa, Artificial Sequence
  Description of Artificial Sequence: Synthetic peptide
CQQGHTLPWTF

SEQ ID NO: 1280 - protein, 11 aa, Artificial Sequence [sequence omitted]

SEQ ID NO: 1281 - protein, 11 aa, Artificial Sequence
  Description of Artificial Sequence: Synthetic peptide
CQQGHTLPWTF

SEQ ID NO: 1282 - protein, 11 aa, Artificial Sequence [sequence omitted]

SEQ ID NO: 1283 - protein, 11 aa, Artificial Sequence
  Description of Artificial Sequence: Synthetic peptide
CQQVVWRPFTF

SEQ ID NO: 1284 - protein, 11 aa, Artificial Sequence
  Description of Artificial Sequence: Synthetic peptide
CQQDAFHPPTF

SEQ ID NO: 1285 - protein, 11 aa, Artificial Sequence
  Description of Artificial Sequence: Synthetic peptide
CQQGHTLPWTF

SEQ ID NO: 1286 - protein, 11 aa, Artificial Sequence [sequence omitted]

SEQ ID NO: 1287 - protein, 11 aa, Artificial Sequence
  Description of Artificial Sequence: Synthetic peptide
CQQGHTLPWTF

SEQ ID NO: 1288 - protein, 11 aa, Artificial Sequence
  Description of Artificial Sequence: Synthetic peptide
CQQGHTLPWTF

SEQ ID NO: 1289 - protein, 11 aa, Artificial Sequence
  Description of Artificial Sequence: Synthetic peptide
CQQGHTLPWTF

SEQ ID NO: 1290 - protein, 11 aa, Artificial Sequence
  Description of Artificial Sequence: Synthetic peptide
CQQGHTLPWTF

SEQ ID NO: 1291 - protein, 11 aa, Artificial Sequence
  Description of Artificial Sequence: Synthetic peptide
CQQGHTLPWTF

SEQ ID NO: 1292 - protein, 11 aa, Artificial Sequence
  Description of Artificial Sequence: Synthetic peptide
CQQGHTLPWTF

SEQ ID NO: 1293 - protein, 11 aa, Artificial Sequence
  Description of Artificial Sequence: Synthetic peptide
CQQGHTLPWTF

SEQ ID NO: 1294 - protein, 11 aa, Artificial Sequence
  Description of Artificial Sequence: Synthetic peptide
CQQGHTLPWTF

SEQ ID NO: 1295 - protein, 11 aa, Artificial Sequence
  Description of Artificial Sequence: Synthetic peptide
CQQGHTLPWTF

SEQ ID NO: 1296 - protein, 11 aa, Artificial Sequence
  Description of Artificial Sequence: Synthetic peptide
CQQGHTLPWTF

SEQ ID NO: 1297 - protein, 11 aa, Artificial Sequence
  Description of Artificial Sequence: Synthetic peptide
CQQGHTLPWTF

SEQ ID NO: 1298 - protein, 11 aa, Artificial Sequence
  Description of Artificial Sequence: Synthetic peptide
CQQSYENPLTF

SEQ ID NO: 1299 - protein, 11 aa, Artificial Sequence
  Description of Artificial Sequence: Synthetic peptide
CQQGHTLPWTF

SEQ ID NO: 1300 - protein, 11 aa, Artificial Sequence
  Description of Artificial Sequence: Synthetic peptide
CQQGHTLPWTF

SEQ ID NO: 1301 - protein, 11 aa, Artificial Sequence [sequence omitted]

SEQ ID NO: 1302 - protein, 11 aa, Artificial Sequence
  Description of Artificial Sequence: Synthetic peptide
CQQGHTLPWTF

SEQ ID NO: 1303 - protein, 11 aa, Artificial Sequence
  Description of Artificial Sequence: Synthetic peptide
CQQGHTLPWTF

SEQ ID NO: 1304 - protein, 11 aa, Artificial Sequence
  Description of Artificial Sequence: Synthetic peptide
CQQGHTLPWTF

SEQ ID NO: 1305 - protein, 11 aa, Artificial Sequence
  Description of Artificial Sequence: Synthetic peptide
CQQGHTLPWTF

SEQ ID NO: 1306 - protein, 11 aa, Artificial Sequence
  Description of Artificial Sequence: Synthetic peptide
CQQYASVPVTF

SEQ ID NO: 1307 - protein, 11 aa, Artificial Sequence
  Description of Artificial Sequence: Synthetic peptide
CQQGHTLPWTF

SEQ ID NO: 1308 - protein, 11 aa, Artificial Sequence [sequence omitted]

SEQ ID NO: 1309 - protein, 11 aa, Artificial Sequence
  Description of Artificial Sequence: Synthetic peptide
CQQGYRWPVTF

SEQ ID NO: 1310 - protein, 11 aa, Artificial Sequence
  Description of Artificial Sequence: Synthetic peptide
CQQGHTLPWTF

SEQ ID NO: 1311 - protein, 11 aa, Artificial Sequence
  Description of Artificial Sequence: Synthetic peptide
CQQGHTLPWTF

SEQ ID NO: 1312 - protein, 14 aa, Artificial Sequence
  Description of Artificial Sequence: Synthetic peptide
CMSRSIWGNPHVLF

SEQ ID NO: 1313 - protein, 14 aa, Artificial Sequence
  Description of Artificial Sequence: Synthetic peptide
CATRAVRGNPHVLF

SEQ ID NO: 1314 - protein, 11 aa, Artificial Sequence
  Description of Artificial Sequence: Synthetic peptide
CQQGHTLPWTF

SEQ ID NO: 1315 - protein, 11 aa, Artificial Sequence
  Description of Artificial Sequence: Synthetic peptide
CQQGHTLPWTF

SEQ ID NO: 1316 - protein, 11 aa, Artificial Sequence
  Description of Artificial Sequence: Synthetic peptide
CQQYHDFPLTF

SEQ ID NO: 1317 - protein, 11 aa, Artificial Sequence
  Description of Artificial Sequence: Synthetic peptide
CQQGHTLPWTF

SEQ ID NO: 1318 - protein, 11 aa, Artificial Sequence
  Description of Artificial Sequence: Synthetic peptide
CQQGHTLPWTF

SEQ ID NO: 1319 - protein, 11 aa, Artificial Sequence
  Description of Artificial Sequence: Synthetic peptide
CQQGYTLPWTF

SEQ ID NO: 1320 - protein, 11 aa, Artificial Sequence
  Description of Artificial Sequence: Synthetic peptide
CQNGHSFPLTF

SEQ ID NO: 1321 - protein, 11 aa, Artificial Sequence
  Description of Artificial Sequence: Synthetic peptide
CQQGHTLPWTF

SEQ ID NO: 1322 - protein, 11 aa, Artificial Sequence
  Description of Artificial Sequence: Synthetic peptide
CQQFAYFPATF

SEQ ID NO: 1323 - protein, 11 aa, Artificial Sequence
  Description of Artificial Sequence: Synthetic peptide
CQQGHTLPWTF

SEQ ID NO: 1324 - protein, 11 aa, Artificial Sequence [sequence omitted]

SEQ ID NO: 1325 - protein, 11 aa, Artificial Sequence
  Description of Artificial Sequence: Synthetic peptide
CQQGHTLPWTF

SEQ ID NO: 1326 - protein, 11 aa, Artificial Sequence
  Description of Artificial Sequence: Synthetic peptide
CQQGHTLPWTF

SEQ ID NO: 1327 - protein, 11 aa, Artificial Sequence [sequence omitted]

SEQ ID NO: 1328 - protein, 11 aa, Artificial Sequence
  Description of Artificial Sequence: Synthetic peptide
CQQGHTLPWTF

SEQ ID NO: 1329 - protein, 11 aa, Artificial Sequence
  Description of Artificial Sequence: Synthetic peptide
CQQGHTLPWTF

SEQ ID NO: 1330 - protein, 11 aa, Artificial Sequence
  Description of Artificial Sequence: Synthetic peptide
CQQGHTLPWTF

SEQ ID NO: 1331 - protein, 11 aa, Artificial Sequence [sequence omitted]

SEQ ID NO: 1332 - protein, 11 aa, Artificial Sequence
  Description of Artificial Sequence: Synthetic peptide
CQQGHTLPWTF

SEQ ID NO: 1333 - protein, 11 aa, Artificial Sequence [sequence omitted]

SEQ ID NO: 1334 - protein, 11 aa, Artificial Sequence
  Description of Artificial Sequence: Synthetic peptide
CQQGHTLPWTF

SEQ ID NO: 1335 - protein, 11 aa, Artificial Sequence
  Description of Artificial Sequence: Synthetic peptide
CQQGHTLPWTF

SEQ ID NO: 1336 - protein, 11 aa, Artificial Sequence
  Description of Artificial Sequence: Synthetic peptide
CQQGHTLPWTF

SEQ ID NO: 1337 - protein, 11 aa, Artificial Sequence
  Description of Artificial Sequence: Synthetic peptide
CQQGHTLPWTF

SEQ ID NO: 1338 - protein, 11 aa, Artificial Sequence
  Description of Artificial Sequence: Synthetic peptide
CQQGHTLPWTF

SEQ ID NO: 1339 - protein, 11 aa, Artificial Sequence [sequence omitted]

SEQ ID NO: 1340 - protein, 11 aa, Artificial Sequence
  Description of Artificial Sequence: Synthetic peptide
CQQNLAPPYTF

SEQ ID NO: 1341 - protein, 11 aa, Artificial Sequence
  Description of Artificial Sequence: Synthetic peptide
CQQGHTLPWTF

SEQ ID NO: 1342 - protein, 11 aa, Artificial Sequence
  Description of Artificial Sequence: Synthetic peptide
CQQNLAPPYTF

SEQ ID NO: 1343 - protein, 11 aa, Artificial Sequence
  Description of Artificial Sequence: Synthetic peptide
CQQSNSWPYTF

SEQ ID NO: 1344 - protein, 11 aa, Artificial Sequence
  Description of Artificial Sequence: Synthetic peptide
CQQGHTLPWTF

SEQ ID NO: 1345 - protein, 11 aa, Artificial Sequence
  Description of Artificial Sequence: Synthetic peptide
CQQGYTLPWTF

SEQ ID NO: 1346 - protein, 13 aa, Artificial Sequence
  Description of Artificial Sequence: Synthetic peptide
CQQSASAHPGWTF

SEQ ID NO: 1347 - protein, 11 aa, Artificial Sequence
  Description of Artificial Sequence: Synthetic peptide
CQQGYRAPWTF

SEQ ID NO: 1348 - protein, 11 aa, Artificial Sequence [sequence omitted]

SEQ ID NO: 1349 - protein, 11 aa, Artificial Sequence
  Description of Artificial Sequence: Synthetic peptide
CQQSYRVPRSF

SEQ ID NO: 1350 - protein, 12 aa, Artificial Sequence
  Description of Artificial Sequence: Synthetic peptide
CQHFGGSPLLTF

SEQ ID NO: 1351 - protein, 10 aa, Artificial Sequence
  Description of Artificial Sequence: Synthetic peptide
CQQTYSPVTF

SEQ ID NO: 1352 - protein, 11 aa, Artificial Sequence
  Description of Artificial Sequence: Synthetic peptide
CQQGFYTPWTF

SEQ ID NO: 1353 - protein, 11 aa, Artificial Sequence
  Description of Artificial Sequence: Synthetic peptide
CQQGYRAPWTF

SEQ ID NO: 1354 - protein, 11 aa, Artificial Sequence
  Description of Artificial Sequence: Synthetic peptide
CHQSYGIPWTF

SEQ ID NO: 1355 - protein, 11 aa, Artificial Sequence
  Description of Artificial Sequence: Synthetic peptide
CQQSYRSFFTF

SEQ ID NO: 1356 - protein, 11 aa, Artificial Sequence
  Description of Artificial Sequence: Synthetic peptide
CQQSYGNVWTF

SEQ ID NO: 1357 - protein, 11 aa, Artificial Sequence
  Description of Artificial Sequence: Synthetic peptide
CQQGYRAPWTF

SEQ ID NO: 1358 - protein, 11 aa, Artificial Sequence
  Description of Artificial Sequence: Synthetic peptide
CLQAYSTPWTF

SEQ ID NO: 1359 - protein, 11 aa, Artificial Sequence
  Description of Artificial Sequence: Synthetic peptide
CQQSHQTPWTF

SEQ ID NO: 1360 - protein, 11 aa, Artificial Sequence
  Description of Artificial Sequence: Synthetic peptide
CQQSGSSSLTF

SEQ ID NO: 1361 - protein, 12 aa, Artificial Sequence
  Description of Artificial Sequence: Synthetic peptide
CQQSYIMSQWTF

SEQ ID NO: 1362 - protein, 11 aa, Artificial Sequence
  Description of Artificial Sequence: Synthetic peptide
CQQGFRAPRTF

SEQ ID NO: 1363 - protein, 11 aa, Artificial Sequence
  Description of Artificial Sequence: Synthetic peptide
CQQSHATPWTF

SEQ ID NO: 1364 - protein, 13 aa, Artificial Sequence
  Description of Artificial Sequence: Synthetic peptide
CQLFDRSRPGYTF

SEQ ID NO: 1365 - protein, 11 aa, Artificial Sequence
  Description of Artificial Sequence: Synthetic peptide
CQQGYRAPWTF

SEQ ID NO: 1366 - protein, 12 aa, Artificial Sequence
  Description of Artificial Sequence: Synthetic peptide
CQQYKRSSGFTF

SEQ ID NO: 1367 - protein, 119 aa, Artificial Sequence
  Description of Artificial Sequence: Synthetic polypeptide
EVQLVESGGGLVQAGGSLRLSCAASGRTFSNYAMGWFRQAPGKEREFVAAITWSGTRTDYADSVKGRFTISADNAKNTVYLQMNSLKPEDTAVYYCAAAAWTIYEYDYWGQGTQVTVSS

SEQ ID NO: 1368 - protein, 118 aa, Artificial Sequence
  Description of Artificial Sequence: Synthetic polypeptide
EVQLVESGGGLVQAGGSLRLSCAASGRTFDIYAMGWFRQAPGKEREWVSTISWSGGRTYYADSVKGRFTISADNAKNTVYLQMNSLKPEDTAVYYCAARPVYRTYGSWGQGTQVTVSS

SEQ ID NO: 1369 - protein, 119 aa, Artificial Sequence
  Description of Artificial Sequence: Synthetic polypeptide
EVQLVESGGGLVQAGGSLRLSCAASGFTFSSYAMGWFRQAPGKEREFVAAITWSGTRTDYADSVKGRFTISADNAKNTVYLQMNSLKPEDTAVYYCAAAAWRYSEYDYWGQGTQVTVSS

SEQ ID NO: 1370 - protein, 117 aa, Artificial Sequence
  Description of Artificial Sequence: Synthetic polypeptide
EVQLVESGGGLVQAGGSLRLSCAASGSTFDTYVMGWFRQAPGKERELVSTISSDGDSTYYADSVKGRFTISADNAKNTVYLQMNSLKPEDTAVYYCAAGTRRGRNYWGQGTQVTVSS

SEQ ID NO: 1371 - protein, 118 aa, Artificial Sequence
  Description of Artificial Sequence: Synthetic polypeptide
EVQLVESGGGLVQAGGSLRLSCAASGRTFSIYAMGWFRQAPGKEREWVATISSSGDRTYYADSVKGRFTISADNAKNTVYLQMNSLKPEDTAVYYCAARRYGRRYDYWGQGTQVTVSS

SEQ ID NO: 1372 - protein, 118 aa, Artificial Sequence
  Description of Artificial Sequence: Synthetic polypeptide
EVQLVESGGGLVQAGGSLRLSCAASGGTFRSYVMGWFRQAPGKEREWVATINSSGSRTYYADSVKGRFTISADNAKNTVYLQMNSLKPEDTAVYYCAARPNYRDYEYWGQGTQVTVSS

SEQ ID NO: 1373 - protein, 119 aa, Artificial Sequence; identical to SEQ ID NO: 35
  Description of Artificial Sequence: Synthetic polypeptide

SEQ ID NO: 1374 - protein, 120 aa, Artificial Sequence
  Description of Artificial Sequence: Synthetic polypeptide
EVQLVESGGGLVQAGGSLRLSCAASGRTLDDYVMGWFRQAPGKEREGVATISGGGDTTYYADSVKGRFTISADNAKNTVYLQMNSLKPEDTAVYYCAAVPWRWTTRRDYWGQGTQVTVSS

SEQ ID NO: 1375 - protein, 119 aa, Artificial Sequence
  Description of Artificial Sequence: Synthetic polypeptide
EVQLVESGGGLVQAGGSLRLSCAASGFTFDNYAMGWFRQAPGKEREFVSSITWSGGRTSYADSVKGRFTISADNAKNTVYLQMNSLKPEDTAVYYCAANAWTIYRYDYWGQGTQVTVSS

SEQ ID NO: 1376 - protein, 124 aa, Artificial Sequence; identical to SEQ ID NO: 36
  Description of Artificial Sequence: Synthetic polypeptide

SEQ ID NO: 1377 - protein, 122 aa, Artificial Sequence
  Description of Artificial Sequence: Synthetic polypeptide
EVQLVESGGGLVQAGGSLRLSCAASGRTLSSYAMGWFRQAPGKEREFVASITWGGGRTYYADSVKGRFTISADNAKNTVYLQMNSLKPEDTAVYYCATRLWGTWTAGDYDYWGQGTQVTVSS

SEQ ID NO: 1378 - protein, 119 aa, Artificial Sequence
  Description of Artificial Sequence: Synthetic polypeptide
EVQLVESGGGLVQAGGSLRLSCAASGSTFSSYAMGWFRQAPGKEREFVAAITWSGTRTNYADSVKGRFTISADNAKNTVYLQMNSLKPEDTAVYYCAAAAWTIYTYDSWGQGTQVTVSS

SEQ ID NO: 1379 - protein, 119 aa, Artificial Sequence
  Description of Artificial Sequence: Synthetic polypeptide
EVQLVESGGGLVQAGGSLRLSCAASGFIFSNYAMGWFRQAPGKEREFVAAITWSGGRTYYADSVKGRFTISADNAKNTVYLQMNSLKPEDTAVYYCAAAAWTIYEYDYWGQGTQVTVSS

SEQ ID NO: 1380 - protein, 118 aa, Artificial Sequence
  Description of Artificial Sequence: Synthetic polypeptide
EVQLVESGGGLVQAGGSLRLSCAASGFTFSDYVMGWFRQAPGKEREFVSAISWSGTNTNYADSVKGRFTISADNAKNTVYLQMNSLKPEDTAVYYCATRALRDGRGYWGQGTQVTVSS

SEQ ID NO: 1381 - protein, 119 aa, Artificial Sequence
  Description of Artificial Sequence: Synthetic polypeptide
EVQLVESGGGLVQAGGSLRLSCAASGRTFDSYAMGWFRQAPGKEREGVATISGSGGRTYYADSVKGRFTISADNAKNTVYLQMNSLKPEDTAVYYCAAAAWTIYEFDSWGQGTQVTVTS

SEQ ID NO: 1382 - protein, 118 aa, Artificial Sequence
  Description of Artificial Sequence: Synthetic polypeptide
EVQLVESGGGLVQAGGSLRLSCAASGSIFSIYAMGWFRQAPGKEREWVATISWGGNSTYYADSVKGRFTISADNAKNTVYLQMNSLKPEDTAVYYCAARPRFRTYGYWGQGTQVTVSS

SEQ ID NO: 1383 - protein, 117 aa, Artificial Sequence
  Description of Artificial Sequence: Synthetic polypeptide
EVQLVESGGGLVQAGGSLRLSCAASGSTLSIYAMGWFRQAPGKERELVATISSGGGSTYYADSVKGRFTISADNAKNTVYLQMNSLKPEDTAVYYCAAGSVYGRNYWGQGTQVTVSS

SEQ ID NO: 1384 - protein, 122 aa, Artificial Sequence
  Description of Artificial Sequence: Synthetic polypeptide
EVQLVESGGGLVQAGGSLRLSCAASGSTFSNYAMGWFRQAPGKEREFVSAINSSGSRTYYADSVKGRFTISADNAKNTVYLQMNSLKPEDTAVYYCAARLWGTWTAGDYDYWGQGTQVTVSS

SEQ ID NO: 1385 - protein, 119 aa, Artificial Sequence
  Description of Artificial Sequence: Synthetic polypeptide
EVQLVESGGGLVQAGGSLRLSCAASGRTFSSYAMGWFRQAPGKEREFVATISGSFGRTYYADSVKGRFTISADNAKNTVYLQMNSLKPEDTAVYYCAAGAWTIYEYDYWGQGTQVTVSS

SEQ ID NO: 1386 - protein, 117 aa, Artificial Sequence
  Description of Artificial Sequence: Synthetic polypeptide
EVQLVESGGGLVQAGGSLRLSCAASGSTFSIYAMGWFRQAPGKERELVASISWSGDTTNYADSVKGRFTISADNAKNTVYLQMNSLKPEDTAVYYCAAGSVYGRNSWGQGTQVTVTS

SEQ ID NO: 1387 - protein, 119 aa, Artificial Sequence
  Description of Artificial Sequence: Synthetic polypeptide
EVQLVESGGGLVQAGGSLRLSCAASGSTFSNYAMGWFRQAPGKERELVSAITWSSSRTYYADSVKGRFTISADNAKNTVYLQMNSLKPEDTAVYYCAAAAWTIYNFEYWGQGTQVTVSS

SEQ ID NO: 1388 - protein, 122 aa, Artificial Sequence
  Description of Artificial Sequence: Synthetic polypeptide
EVQLVESGGGLVQAGGSLRLSCAASGSILSSYTMGWFRQAPGKEREFVSTISRSSTRTYYADSVKGRFTISADNAKNTVYLQMNSLKPEDTAVYYCAARLWGTWTAGDYDYWGQGTQVTVSS

SEQ ID NO: 1389 - protein, 117 aa, Artificial Sequence
  Description of Artificial Sequence: Synthetic polypeptide
EVQLVESGGGLVQAGGSLRLSCAASGSTFDIYAMGWFRQAPGKEREFVASISSGDTNTNYADSVKGRFTISADNAKNTVYLQMNSLKHEDTAVYYCAAGRYSGYNSWGQGTQVTVSS

SEQ ID NO: 1390 - protein, 117 aa, Artificial Sequence
  Description of Artificial Sequence: Synthetic polypeptide
EVQLVESGGGLVQAGGSLRLSCAASGRTFDTYAMGWLRQAPGKEREFVSAISTGDGSTNYADSVKGRFTISADNAKNTVYLQMNSLKPEDTAVYYCAAARRSGRGSWGQGTQVTVTS

SEQ ID NO: 1391 - protein, 119 aa, Artificial Sequence
  Description of Artificial Sequence: Synthetic polypeptide
EVQLVESGGGLVQAGGSLRLSCAASGFTFDNYAMGWFRQAPGKEREGVAAITWSGGRTYYADSVKGRFTISADNAKNTVYLQMNSLKPEDTAVYYCAAAAWTIYEYDSWGQGTQVTVTS

SEQ ID NO: 1392 - protein, 119 aa, Artificial Sequence
  Description of Artificial Sequence: Synthetic polypeptide
EVQLVESGGGLVQAGGSLRLSCAASGFTFDNYAMGWFRQAPGKEREFVATITWSGTRTNYADSVKGRFTISADNAKNTVYLQMNSLKPEDTAVYYCAAAAWTIYDYDYWGQGTQVTVSS

SEQ ID NO: 1393 - protein, 119 aa, Artificial Sequence
  Description of Artificial Sequence: Synthetic polypeptide
EVQLVESGGGLVQAGGSLRLSCAASGRTFSNNVMGWFRQAPGKEREFVAAISWGGASTNYADSVKGRFTISADNAKNTVYLQMNSLKPEDTAVYYCAAGPKTPDTRNYWGQGTQVTVSS

SEQ ID NO: 1394 - protein, 118 aa, Artificial Sequence
  Description of Artificial Sequence: Synthetic polypeptide
EVQLVESGGGLVQAGGSLRLSCAASGFIFDSYAMGWFRQAPGKEREFVAAISWGGSNTNYADSVKGRFTISADNAKNTVYLQMNSLKPEDTAVYYCAAVRITDGRDYWGQGTQVTVSS

SEQ ID NO: 1395 - protein, 119 aa, Artificial Sequence; identical to SEQ ID NO: 1367
  Description of Artificial Sequence: Synthetic polypeptide

SEQ ID NO: 1396 - protein, 119 aa, Artificial Sequence; identical to SEQ ID NO: 1369
  Description of Artificial Sequence: Synthetic polypeptide

SEQ ID NO: 1397 - protein, 118 aa, Artificial Sequence
  Description of Artificial Sequence: Synthetic polypeptide
EVQLVESGGGLVQAGGSLRLSCAASGFTFSIYAMGWFRQAPGKEREWVSTISWSGGNTYYADSVKGRFTISADNAKNTVYLQMNSLKPEDTAVYYCATRPRFRRYDSWGQGTQVTVSS

SEQ ID NO: 1398 - protein, 123 aa, Artificial Sequence
  Description of Artificial Sequence: Synthetic polypeptide
EVQLVESGGGLVQAGGSLRLSCAASGSTFDSYAMGWFRQAPGKEREGVAAITTSGSSTYYADSVKGRFTISADNAKNTVYLQMNSLKPEDTAVYYCAARGGVRSGSPGTYNYWGQGTQVTVSS

SEQ ID NO: 1399 - protein, 119 aa, Artificial Sequence
  Description of Artificial Sequence: Synthetic polypeptide
EVQLVESGGGLVQAGGSLRLSCAASGFIFSTYAMGWFRQAPGKERELVSAITRSGITTYYADSVKGRFTISADNAKNTVYLQMNSLKPEDTAVYYCAAAAWTIYEYDYWGQGTQVTVSS

SEQ ID NO: 1400 - protein, 122 aa, Artificial Sequence
  Description of Artificial Sequence: Synthetic polypeptide
EVQLVESGGGLVQAGGSLRLSCAASGFTFRNYAMGWFRQAPGKEREFVSSISSSSSRTSYADSVKGRFTISADNAKNTVYLQMNSLKPEDTAVYYCAARLWGTWTAGDYDYWGQGTQVTVSS

SEQ ID NO: 1401 - protein, 118 aa, Artificial Sequence
  Description of Artificial Sequence: Synthetic polypeptide
EVQLVESGGGLVQAGGSLRLSCAASGRIFSIYTMGWFRQAPGKEREWVATINSSGSRTYYADSVKGRFTISADNAKNTVYLQMNSLKPEDTAVYYCAARPSYNRYDSWGQGTQVTVSS

SEQ ID NO: 1402 - protein, 119 aa, Artificial Sequence
  Description of Artificial Sequence: Synthetic polypeptide
EVQLVESGGGLVQAGGSLRLSCAASGFTFSSYAMGWFRQAPGKEREFVASITWSGTSTNYADSVKGRFTISADNAKNTVYLQMNSLKPEDTAVYYCAAAAWTIYAYDYWGQGTQVTVSS

SEQ ID NO: 1403 - protein, 119 aa, Artificial Sequence
  Description of Artificial Sequence: Synthetic polypeptide
EVQLVESGGGLVQAGGSLRLSCAASGRTFSNYAMGWFRQAPGKEREFVAGISWSGTRTYYADSVKGRFTISADNAKNTVYLQMNSLKPEDTAVYYCAAAAWTIYEYDYWGQGTQVTVSS

SEQ ID NO: 1404 - protein, 116 aa, Artificial Sequence
  Description of Artificial Sequence: Synthetic polypeptide
EVQLVESGGGLVQAGGSLRLSCAASGSTFSSYAMGWFRQAPGKEREFVSAISRNGASTSYADSVKGRFTISADNAKNTVYLQMNSLKPEDTAVYYCAAAGTRFDYWGQGTQVTVSS

SEQ ID NO: 1405 - protein, 120 aa, Artificial Sequence; identical to SEQ ID NO: 1374
  Description of Artificial Sequence: Synthetic polypeptide

SEQ ID NO: 1406 - protein, 119 aa, Artificial Sequence; identical to SEQ ID NO: 1392
  Description of Artificial Sequence: Synthetic polypeptide

SEQ ID NO: 1407 - protein, 119 aa, Artificial Sequence
  Description of Artificial Sequence: Synthetic polypeptide
EVQLVESGGGLVQAGGSLRLSCAASGRTFSTNAMGWFRQAPGKEREWVTAITTSGGNTYYADSVKGRFTISADNAKNTVYLQMNSLKPEDTAVYYCAARDETYGTYDYWGQGTQVTVSS

SEQ ID NO: 1408 - protein, 122 aa, Artificial Sequence
  Description of Artificial Sequence: Synthetic polypeptide
EVQLVESGGGLVQAGGSLRLSCAASGSTFSTYAMGWFRQAPGKEREFVATISTSSSRTYYADSVKGRFTISADNAKNTVYLQMNSLKPEDTAVYYCAARLWGTWTAGDYDYWGQGTQVTVSL

SEQ ID NO: 1409 - protein, 118 aa, Artificial Sequence
  Description of Artificial Sequence: Synthetic polypeptide
EVQLVESGGGLVQAGGSLRLSCAASGRTFDSYAMGWFRQAPGKEREWVSAISWSGSSTYYADSVKGRFTISADNAKNTVYLQMNSLKPEDTAVYYCAARGGYGRYDSWGQGTQVTVTS

SEQ ID NO: 1410 - protein, 119 aa, Artificial Sequence
  Description of Artificial Sequence: Synthetic polypeptide
EVQLVESGGGLVQAGGSLRLSCAASGFTFDNYAMGWFRQAPGKEREFVATITWSGTTTNYADSVKGRFTISADNAKNTVYLQMNSLKPEDTAVYYCAAAAWTIYDYDYWGQGTQVTVSS

SEQ ID NO: 1411 - protein, 119 aa, Artificial Sequence
  Description of Artificial Sequence: Synthetic polypeptide
EVQLVESGGGLVQAGGSLRLSCAASGFTFSSYAMGWFRQAPGKEREFVASITWSGTRTDYADSVKGRFTISADNAKNTVYLQMNSLKPEDTAVYYCAAAAWTIYGYEYWGQGTQVTVSS

SEQ ID NO: 1412 - protein, 117 aa, Artificial Sequence
  Description of Artificial Sequence: Synthetic polypeptide
EVQLVESGGGLVQAGGSLRLSCAASGSTFDIYAMGWFRQAPGKEREFVASISSGDTNTYYADSVKGRFTISADNAKNTVYLQMNSLKHEDTAVYYCAAGRYSGYNSWGQGTQVTVSS

SEQ ID NO: 1413 - protein, 127 aa, Artificial Sequence
  Description of Artificial Sequence: Synthetic polypeptide
EVQLVESGGGLVQAGGSLRLSCAASGSTLSSYAMGWFRQAPGKERELVAAITGSGGRTYYADSVKGRFTISADNAKNTVYLQMNSLKPEDTAVYYCAANRRYSFPYWSFWYDDFDYWGQGTQVTVSS

SEQ ID NO: 1414 - protein, 118 aa, Artificial Sequence
  Description of Artificial Sequence: Synthetic polypeptide
EVQLVESGGGLVQAGGSLRLSCAASGFAFSSYWMGWFRQAPGKERELVAARNSGGNTNYADSVKGRFTISADNAKNTVYLQMNSLKPEDTAVYYCAADVWYGSTWRNWGQGTQVTVSS

SEQ ID NO: 1415 - protein, 116 aa, Artificial Sequence
  Description of Artificial Sequence: Synthetic polypeptide
EVQLVESGGGLVQAGGSLRLSCAASGRTFGDYIMGWFRQAPGKERELVATISGGGSTNYADSVKGRFTISADNAKNTVYLQMNSLKPEDTAVYYCAAVFSRGPLTWGQGTQVTVSS

SEQ ID NO: 1416 - protein, 116 aa, Artificial Sequence
  Description of Artificial Sequence: Synthetic polypeptide
EVQLVESGGGLVQAGGSLRLSCAASGNIFSRYIMGWFRQAPGKEREWVAGISNGGTTKYADSVKGRFTISADNAKNTVYLQMNSLKPEDTAVYYCAQGWKIRPTIWGQGTQVTVSS

SEQ ID NO: 1417 - protein, 118 aa, Artificial Sequence
  Description of Artificial Sequence: Synthetic polypeptide
EVQLVESGGGLVQAGGSLRLSCAASGFTFSTHWMGWFRQAPGKERELVAARNSGGNTNYADSVKGRFTISADNAKNTVYLQMNSLKPEDTAVYYCAADVWYGSTWRNWGQGTQVTVSS

SEQ ID NO: 1418 - protein, 123 aa, Artificial Sequence
  Description of Artificial Sequence: Synthetic polypeptide
EVQLVESGGGLVQAGGSLRLSCAASGGTFRNYGMGWFRQAPGKERELVAAISWSGVSTIYADSVKGRFTISADNAKNTVYLQMNSLKPEDTAVYYCASSPYGPLYRSTHYYDWGQGTQVTVSS

SEQ ID NO: 1419 - protein, 115 aa, Artificial Sequence
  Description of Artificial Sequence: Synthetic polypeptide
EVQLVESGGGLVQAGGSLRLSCAASGRFSRINSMGWFRQAPGKERELVAHIFRSGITSYASYADSVKGRFTISADNAKNTVYLQMNSLKPEDTAVYYCAIGRGSWGQGTQVTVSS

SEQ ID NO: 1420 - protein, 116 aa, Artificial Sequence
  Description of Artificial Sequence: Synthetic polypeptide
EVQLVESGGGLVQAGGSLRLSCAASGIPASIRTMGWFRQAPGKEREGISLITSDDGSTYYADSVKGRFTISADNAKNTVYLQMNSLKPEDTAVYYCAWTTNRGMDWGQGTQVTVSS

SEQ ID NO: 1421 - protein, 118 aa, Artificial Sequence
  Description of Artificial Sequence: Synthetic polypeptide
EVQLVESGGGLVQAGGSLRLSCAASGFTMSSSWMGWFRQAPGKEREFVATLTSGGSTNYADSVKGRFTISADNAKNTVYLQMNSLKPEDTAVYYCAADVWYGSTWRNWGQGTQVTVSS

SEQ ID NO: 1422 - protein, 125 aa, Artificial Sequence
  Description of Artificial Sequence: Synthetic polypeptide
EVQLVESGGGLVQAGGSLRLSCAASGPISGINRMGWFRQAPGKEREWVSTITFNGDHTYYADSVKGRFTISADNAKNTVYLQMNSLKPEDTAVYYCAARPYTRPGSMWVSSLYDWGQGTQVTVSS

SEQ ID NO: 1423 - protein, 118 aa, Artificial Sequence
  Description of Artificial Sequence: Synthetic polypeptide
EVQLVESGGGLVQAGGSLRLSCAASVRTFSLSDMGWFRQAPGKEREFVGAINWLSESTYYADSVKGRFTISADNAKNTVYLQMNSLKPEDTAVYYCAAQGGVLSGWDWGQGTQVTVSS

SEQ ID NO: 1424 - protein, 116 aa, Artificial Sequence
  Description of Artificial Sequence: Synthetic polypeptide
EVQLVESGGGLVQAGGSLRLSCAASGSITSIRSMGWFRQAPGKEREWVSSVYIFGGSTYYADSVKGRFTISADNAKNTVYLQMNSLKPEDTAVYYCANSNKPKFDWGQGTQVTVSS

SEQ ID NO: 1425 - protein, 116 aa, Artificial Sequence
  Description of Artificial Sequence: Synthetic polypeptide
EVQLVESGGGLVQAGGSLRLSCAASGRTFGDYIMGWFRQAPGKERELVASVSGGGNSDYADSVKGRFTISADNAKNTVYLQMNSLKPEDTAVYYCAAVFSRGPLTWGQGTQVTVSS

SEQ ID NO: 1426 - protein, 112 aa, Artificial Sequence
  Description of Artificial Sequence: Synthetic polypeptide
EVQLVESGGGLVQAGGSLRLSCAASGRTFSNYFMGWFRQAPGKERESVAAINWDSARTYYADSVKGRFTISADNAKNTVYLQMNSLKPEDTAVYYCASAGRWGQGTQVTVSS

SEQ ID NO: 1427 - protein, 121 aa, Artificial Sequence
  Description of Artificial Sequence: Synthetic polypeptide
EVQLVESGGGLVQAGGSLRLSCAASGPTFSIYDMGWFRQAPGKEREFVAAITWNSGRTNYADSVKGRFTISADNAKNTVYLQMNSLKPEDTAVYYCAAGAWSSLRKTAASWGQGTQVTVSS

SEQ ID NO: 1428 - protein, 119 aa, Artificial Sequence
  Description of Artificial Sequence: Synthetic polypeptide
EVQLVESGGGLVQAGGSLRLSCAASGFTFSGNWMGWFRQAPGKEREWVSGISSGGGRTYYADSVKGRFTISADNAKNTVYLQMNSLKPEDTAVYYCAADVWYGSTWRNWGQGTQVTVSS

SEQ ID NO: 1429 - protein, 113 aa, Artificial Sequence
  Description of Artificial Sequence: Synthetic polypeptide
EVQLVESGGGLVQAGGSLRLSCAASGFPFSEYPMGWFRQAPGKEREFVAVVNWNGDSTYYADSVKGRFTISADNAKNTVYLQMNSLKPEDTAVYYCANFNRDWGQGTQVTVSS

SEQ ID NO: 1430 - protein, 114 aa, Artificial Sequence
  Description of Artificial Sequence: Synthetic polypeptide
EVQLVESGGGLVQAGGSLRLSCAASGSIFNIGMGWFRQAPGKEREWVSSIYSNGHTYYADSVKGRFTISADNAKNTVYLQMNSLKPEDTAVYYCANSNKPKFDWGQGTQVTVSS

SEQ ID NO: 1431 - protein, 116 aa, Artificial Sequence
  Description of Artificial Sequence: Synthetic polypeptide
EVQLVESGGGLVQAGGSLRLSCAASGRAFSLRTMGWFRQAPGKEREGISLITSDDGSTYYADSVKGRFTISADNAKNTVYLQMNSLKPEDTAVYYCAWTTNRGMDWGQGTQVTVSS

SEQ ID NO: 1432 - protein, 118 aa, Artificial Sequence
  Description of Artificial Sequence: Synthetic polypeptide
EVQLVESGGGLVQAGGSLRLSCAASGRTFSSYAMMGWFRQAPGKEREFLAIITDGSKTLYADSVKGRFTISADNAKNTVYLQMNSLKPEDTAVYYCAAQFTLARHLVWGQGTQVTVSS

SEQ ID NO: 1433 - protein, 121 aa, Artificial Sequence
  Description of Artificial Sequence: Synthetic polypeptide
EVQLVESGGGLVQAGGSLRLSCAASGPTFSIYDMGWFRQAPGKEREFVAVINWSRGSTFYADSVKGRFTISADNAKNTVYLQMNSLKPEDTAVYYCAAGVWSSLRHTAANWGQGTQVTVSS

SEQ ID NO: 1434 - protein, 118 aa, Artificial Sequence
  Description of Artificial Sequence: Synthetic polypeptide
EVQLVESGGGLVQAGGSLRLSCAASGFTFSTSWMGWFRQAPGKERELVATINSGGGTNYADSVKGRFTISADNAKNTVYLQMNSLKPEDTAVYYCAADVWYGSTWRNWGQGTQVTVSS

SEQ ID NO: 1435 - protein, 119 aa, Artificial Sequence
  Description of Artificial Sequence: Synthetic polypeptide
EVQLVESGGGLVQAGGSLRLSCAASGFTLSGNWMGWFRQAPGKEREFVASISSSGVSKHYADSVKGRFTISADNAKNTVYLQMNSLKPEDTAVYYCAADVWYGSTWRNWGRGTQVTVSS

SEQ ID NO: 1436 - protein, 116 aa, Artificial Sequence
  Description of Artificial Sequence: Synthetic polypeptide
EVQLVESGGGLVQAGGSLRLSCAASGRAFRRYTMGWFRQAPGKEREFVAAIRWSGGTTFYADSVKGRFTISADNAKNTVYLQMNSLKPEDTAVYYCAAEWAAMKDWGQGTQVTVSS

SEQ ID NO: 1437 - protein, 116 aa, Artificial Sequence
  Description of Artificial Sequence: Synthetic polypeptide
EVQLVESGGGLVQAGGSLRLSCAASGNIFSRYIMGWFRQAPGKEREWVAGISNGGTTKYADSVKGRFTISADNAKNTVYLQMNSLKPEDTAVYYCAQGWKIIPTDWGQGTQVTVSS

SEQ ID NO: 1438 - protein, 121 aa, Artificial Sequence
  Description of Artificial Sequence: Synthetic polypeptide
EVQLVESGGGLVQAGGSLRLSCAASGPTFSIYDMGWFRQAPGKEREFVASTIWSRGDTYYADSVKGRFTISADNAKNTVYLQMNSLKPEDTAVYYCAAGVWSSLRHTAANWGQGTQVTVSS

SEQ ID NO: 1439 - protein, 115 aa, Artificial Sequence
  Description of Artificial Sequence: Synthetic polypeptide
EVQLVESGGGLVQAGGSLRLSCAASGRTYYAMGWFRQAPGKEREFLAIITDGSKTLYADSVKGRFTISADNAKNTVYLQMNSLKPEDTAVYYCAAQFTLARHLVWGQGTQVTVSS

SEQ ID NO: 1440 - protein, 118 aa, Artificial Sequence
  Description of Artificial Sequence: Synthetic polypeptide
EVQLVESGGGLVQAGGSLRLSCAASGFTFSTSWMGWFRQAPGKEREFVAGILSDGRELYADSVKGRFTISADNAKNTVYLQMNSLKPEDTAVYYCAADVWYGSTWRNWGQGTQVTVSS

SEQ ID NO: 1441 - protein, 118 aa, Artificial Sequence
  Description of Artificial Sequence: Synthetic polypeptide
EVQLVESGGGLVQAGGSLRLSCAASGRTFESYRMGWFRQAPGKEREFVGGINWSGRTYYADSVKGRFTISADNAKNTVYLQMNSLKPEDTAVYYCAARRLYSGSYLDWGQGTQVTVSS

SEQ ID NO: 1442 - protein, 116 aa, Artificial Sequence
  Description of Artificial Sequence: Synthetic polypeptide
EVQLVESGGGLVQAGGSLRLSCAASGSSLSFNAMGWFRQAPGKEREWVSSVYIFGGSTYYADSVKGRFTISADNAKNTVYLQMNSLKPEDTAVYYCANSNKPKFDWGQGTQVTVSS

SEQ ID NO: 1443 - protein, 116 aa, Artificial Sequence; identical to SEQ ID NO: 37
  Description of Artificial Sequence: Synthetic polypeptide

SEQ ID NO: 1444 - protein, 117 aa, Artificial Sequence
  Description of Artificial Sequence: Synthetic polypeptide
EVQLVESGGGLVQAGGSLRLSCAASGPTFSWTMMGWFRQAPGKEREFLAIITDGSKTLYADSVKGRFTISADNAKNTVYLQMNSLKPEDTAVYYCAAQFTLARHLVWGQGTQVTVSS

SEQ ID NO: 1445 - protein, 116 aa, Artificial Sequence
  Description of Artificial Sequence: Synthetic polypeptide
EVQLVESGGGLVQAGGSLRLSCAASGIIGTIRTMGWFRQAPGKEREGISLITSDDGSTYYADSVKGRFTISADNAKNTVYLQMNSLKPEDTAVYYCAWTTNRGMDWGQGTQVTVSS

SEQ ID NO: 1446 - protein, 115 aa, Artificial Sequence
  Description of Artificial Sequence: Synthetic polypeptide
EVQLVESGGGLVQAGGSLRLSCAASGFTLENNMMGWFRQAPGKERELVSAIGWSGASTYYADSVKGRFTISADNAKNTVYLQMNSLKPEDTAVYYCAANLRGDNWGQGTQVTVSS

SEQ ID NO: 1447 - protein, 116 aa, Artificial Sequence
  Description of Artificial Sequence: Synthetic polypeptide
EVQLVESGGGLVQAGGSLRLSCAASGNIFSRYIMGWFRQAPGKEREWVAGISSGGTTKYADSVKGRFTISADNAKNTVYLQMNSLKPEDTAVYYCAQGWKIVPTNWGQGTQVTVSS

SEQ ID NO: 1448 - protein, 122 aa, Artificial Sequence
  Description of Artificial Sequence: Synthetic polypeptide
EVQLVESGGGLVQAGGSLRLSCAASGNIDRLYAMGWFRQAPGKEREGISLITSDDGSTYYADSVKGRFTISADNAKNTVYLQMNSLKPEDTAVYYCASSGPADARNGERWAWGQGTQVTVSS

SEQ ID NO: 1449 - protein, 116 aa, Artificial Sequence
  Description of Artificial Sequence: Synthetic polypeptide
EVQLVESGGGLVQAGGSLRLSCAASGSIASIHAIGWFRQAPGKEREWVSSVYIFGGSTYYADSVKGRFTISADNAKNTVYLQMNSLKPEDTAVYYCANSNKPKFDWGQGTQVTVSS

SEQ ID NO: 1450 - protein, 116 aa, Artificial Sequence
  Description of Artificial Sequence: Synthetic polypeptide
EVQLVESGGGLVQAGGSLRLSCAASGRTFSSKAMGWFRQAPGKEREWVSSVYIFGGSTYYADSVKGRFTISADNAKNTVYLQMNSLKPEDTAVYYCANSNKPKFDWGQGTQVTVSS

SEQ ID NO: 1451 - protein, 116 aa, Artificial Sequence
  Description of Artificial Sequence: Synthetic polypeptide
EVQLVESGGGLVQAGGSLRLSCAASGSIASFNAMGWFRQAPGKEREWVSSVYIFGGSTYYADSVKGRFTISADNAKNTVYLQMNSLKPEDTAVYYCANSNKPKFDWGQGTQVTVSS

SEQ ID NO: 1452 - protein, 118 aa, Artificial Sequence
  Description of Artificial Sequence: Synthetic polypeptide
EVQLVESGGGLVQAGGSLRLSCAASGFTFSTSWMGWFRQAPGKEREWVVGISSGGSTHYADSVKGRFTISADNAKNTVYLQMNSLKPEDTAVYYCAADVWYGSTWRNWGQGTQVTVSS

SEQ ID NO: 1453 - protein, 118 aa, Artificial Sequence
  Description of Artificial Sequence: Synthetic polypeptide
EVQLVESGGGLVQAGGSLRLSCAASGFTFSGNWMGWFRQAPGKEREWVVGISSGGSTHYADSVKGRFTISADNAKNTVYLQMNSLKPEDTAVYYCAADVWYGSTWRNWGQGTQVTVSS

SEQ ID NO: 1454 - protein, 118 aa, Artificial Sequence
  Description of Artificial Sequence: Synthetic polypeptide
EVQLVESGGGLVQAGGSLRLSCAASGRTFSSYAMMGWFRQAPGKEREFLAIITDGSKTLYADSVKGRFTISADNAKNTVYLQMNSLKPEDTAVYYCAAQFILARHLVWGQGTQVTVSS

SEQ ID NO: 1455 - protein, 115 aa, Artificial Sequence
  Description of Artificial Sequence: Synthetic polypeptide
EVQLVESGGGLVQAGGSLRLSCAASGITITTEVMGWFRQAPGKEREYVAAIHWNGDSTAYADSVKGRFTISADNAKNTVYLQMNSLKPEDTAVYYCAQVSQWRAWGQGTQVTVSS

SEQ ID NO: 1456 - protein, 118 aa, Artificial Sequence; identical to SEQ ID NO: 38
  Description of Artificial Sequence: Synthetic polypeptide

SEQ ID NO: 1457 - protein, 119 aa, Artificial Sequence
  Description of Artificial Sequence: Synthetic polypeptide
EVQLVESGGGLVQAGGSLRLSCAASGVTLDLYAMGWFRQAPGKEREFVAGIWRSGGSTVYADSVKGRFTISADNAKNTVYLQMNSLKPEDTAVYYCATWTTTWGRNRDWGQGTQVTVSS

SEQ ID NO: 1458 - protein, 113 aa, Artificial Sequence
  Description of Artificial Sequence: Synthetic polypeptide
EVQLVESGGGLVQAGGSLRLSCAASGGTFSGGFMGWFRQAPGKEREWVASVLRGGYTWYADSVKGRFTISADNAKNTVYLQMNSLKPEDTAVYYCANGGSSYWGQGTQVTVSS

SEQ ID NO: 1459 - protein, 117 aa, Artificial Sequence
  Description of Artificial Sequence: Synthetic polypeptide
EVQLVESGGGLVQAGGSLRLSCAASGRTFSTYASMWWFRQAPGKEREFLAIITDGSKTLYADSVKGRFTISADNAKNTVYLQMNSLKPEDTAVYYCAGSWSYPGLTWGQGTQVTVSS

SEQ ID NO: 1460 - protein, 118 aa, Artificial Sequence
  Description of Artificial Sequence: Synthetic polypeptide
EVQLVESGGGLVQAGGSLRLSCAASGFTMSSSWMGWFRQAPGKEREWVVGISSGGSTHYADSVKGRFTISADNAKNTVYLQMNSLKPEDTAVYYCAADVWYGSTWRNWGQGTQVTVSS

SEQ ID NO: 1461 - protein, 123 aa, Artificial Sequence
  Description of Artificial Sequence: Synthetic polypeptide
EVQLVESGGGLVQAGGSLRLSCAASGFPVNRYSMGWFRQAPGKERELVSAIGWSGASTYYADSVKGRFTISADNAKNTVYLQMNSLKPEDTAVYYCAADFWLARLRVADDYDWGQGTQVTVSS

SEQ ID NO: 1462 - protein, 116 aa, Artificial Sequence
  Description of Artificial Sequence: Synthetic polypeptide
EVQLVESGGGLVQAGGSLRLSCAASGNIFSRYIMGWFRQAPGKEREWVAGISNGGTTKYADSVKGRFTISADNAKNTVYLQMNSLKPEDTAVYYCAQGWKIVPTNWGQGTQVTVSS

SEQ ID NO: 1463 - protein, 112 aa, Artificial Sequence
  Description of Artificial Sequence: Synthetic polypeptide
EVQLVESGGGLVQAGGSLRLSCAASGRSFSNYVMGWFRQAPGKERERVATITSGGLTVYADSVKGRFTISADNAKNTVYLQMNSLKPEDTAVYYCALYRVNWGQGTQVTVSS

SEQ ID NO: 1464 - protein, 118 aa, Artificial Sequence
  Description of Artificial Sequence: Synthetic polypeptide
EVQLVESGGGLVQAGGSLRLSCAASGSIFSISDMGWFRQAPGKEREFVGAINWLSESTYYADSVKGRFTISADNAKNTVYLQMNSLKPEDTAVYYCAAQGGVLSGWDWGQGTQVTVSS

SEQ ID NO: 1465 - protein, 112 aa, Artificial Sequence
  Description of Artificial Sequence: Synthetic polypeptide
EVQLVESGGGLVQAGGSLRLSCAASGRTFSNYFMGWFRQAPGKERESVATVTWRDNITYYADSVKGRFTISADNAKNTVYLQMNSLKPEDTAVYYCASAGRWGQGTQVTVSS

SEQ ID NO: 1466 - protein, 112 aa, Artificial Sequence
  Description of Artificial Sequence: Synthetic polypeptide
EVQLVESGGGLVQAGGSLRLSCAASGLTFSNYVMGWFRQAPGKERESVAAINWDSARTYYADSVKGRFTISADNAKNTVYLQMNSLKPEDTAVYYCASAGRWGQGTQVTVSS

SEQ ID NO: 1467 - protein, 123 aa, Artificial Sequence
  Description of Artificial Sequence: Synthetic polypeptide
EVQLVESGGGLVQAGGSLRLSCAASGFTFRSFGMGWFRQAPGKEREFVASTIWSRGDTYYADSVKGRFTISADNAKNTVYLQMNSLKPEDTAVYYCASSPYGPLYRSTHYYDWGQGTQVTVSS

SEQ ID NO: 1468 - protein, 118 aa, Artificial Sequence
  Description of Artificial Sequence: Synthetic polypeptide
EVQLVESGGGLVQAGGSLRLSCAASGNTFSGGFMGWFRQAPGKEREWVASVLRGGYTWYADSVKGRFTISADNAKNTVYLQMNSLKPEDTAVYYCATGWQSTTKSQGWGQGTQVTVSS

SEQ ID NO: 1469 - protein, 114 aa, Artificial Sequence
  Description of Artificial Sequence: Synthetic polypeptide
EVQLVESGGGLVQAGGSLRLSCAASGLTISTYPMGWFRQAPGKEREFVAAVNWSGRRELYADSVKGRFTISADNAKNTVYLQMNSLKPEDTAVYYCAAFREYHWGQGTQVTVSS

SEQ ID NO: 1470 - protein, 121 aa, Artificial Sequence
  Description of Artificial Sequence: Synthetic polypeptide
EVQLVESGGGLVQAGGSLRLSCAASGPTFSIYDMGWFRQAPGKEREFVAAITWNSGRIGYADSVKGRFTISADNAKNTVYLQMNSLKPEDTAVYYCAAGVWSSLRHTAANWGQGTQVTVSS

SEQ ID NO: 1471 - protein, 119 aa, Artificial Sequence
  Description of Artificial Sequence: Synthetic polypeptide
EVQLVESGGGLVQAGGSLRLSCAASGFAFGDSWMGWFRQAPGKEREWVSGISSGGGRTYYADSVKGRFTISADNAKNTVYLQMNSLKPEDTAVYYCAADVWYGSTWRNWGQGTQVTVSS

SEQ ID NO: 1472 - protein, 118 aa, Artificial Sequence; identical to SEQ ID NO: 39
  Description of Artificial Sequence: Synthetic polypeptide

SEQ ID NO: 1473 - protein, 116 aa, Artificial Sequence
  Description of Artificial Sequence: Synthetic polypeptide
EVQLVESGGGLVQPGGSLRLSCAASGRTFGDYIMGWFRQAPGKERELVAEITRSGRTNYADSVKGRFTISADNSKNTAYLQMNSLKPEDTAVYYCAAVFSRGPLTWGQGTLVTVSS

SEQ ID NO: 1474 - protein, 119 aa, Artificial Sequence
  Description of Artificial Sequence: Synthetic polypeptide
EVQLVESGGGLVQPGGSLRLSCAASGFTFSGNWMGWFRQAPGKEREFVASISSSGISTYYADSVKGRFTISADNSKNTAYLQMNSLKPEDTAVYYCAADVWYGSTWRNWGQGTLVTVSS

SEQ ID NO: 1475 - protein, 118 aa, Artificial Sequence
  Description of Artificial Sequence: Synthetic polypeptide
EVQLVESGGGLVQPGGSLRLSCAASGFPVNRYWMGWFRQAPGKERELVATITSGGSTNYADSVKGRFTISADNSKNTAYLQMNSLKPEDTAVYYCAADVWYGSTWRNWGQGTLVTVSS

SEQ ID NO: 1476 - protein, 116 aa, Artificial Sequence
  Description of Artificial Sequence: Synthetic polypeptide
EVQLVESGGGLVQPGGSLRLSCAASGRTFGDYIMGWFRQAPGKEREFVATISRGGGSTYVDSVKGRFTISADNSKNTAYLQMNSLKPEDTAVYYCAAVFSRGPLTWGQGTLVTVSS

SEQ ID NO: 1477 - protein, 118 aa, Artificial Sequence; identical to SEQ ID NO: 40
  Description of Artificial Sequence: Synthetic polypeptide

SEQ ID NO: 1478 - protein, 129 aa, Artificial Sequence
  Description of Artificial Sequence: Synthetic polypeptide
EVQLVESGGGLVQPGGSLRLSCAASGSTFSINRMGWFRQAPGKEREWVATIVHSGGHSGGTSYYADSVKGRFTISADNSKNTAYLQMNSLKPEDTAVYYCAARPYTRPGSMWVSSLYDWGQGTLVTVSS

SEQ ID NO: 1479 - protein, 118 aa, Artificial Sequence; identical to SEQ ID NO: 41
  Description of Artificial Sequence: Synthetic polypeptide

SEQ ID NO: 1480 - protein, 116 aa, Artificial Sequence
  Description of Artificial Sequence: Synthetic polypeptide
EVQLVESGGGLVQPGGSLRLSCAASGGTLSGNAMGWFRQAPGKEREWVASIYWSSGNTYYADSVKGRFTISADNSKNTAYLQMNSLKPEDTAVYYCANSNKPKFDWGQGTLVTVSS

SEQ ID NO: 1481 - protein, 123 aa, Artificial Sequence
  Description of Artificial Sequence: Synthetic polypeptide
EVQLVESGGGLVQPGGSLRLSCAASGHTFSSYGMGWFRQAPGKERELVAAISWSGISTIYADSVKGRFTISADNSKNTAYLQMNSLKPEDTAVYYCASSPYGPLYRSTHYYDWGQGTLVTVSS

SEQ ID NO: 1482 - protein, 118 aa, Artificial Sequence
  Description of Artificial Sequence: Synthetic polypeptide
EVQLVESGGGLVQPGGSLRLSCAASGFTFSTSWMGWFRQAPGKEREFVASISTSGNTFYADSVKGRFTISADNSKNTAYLQMNSLKPEDTAVYYCAADVWYGSTWRNWGQGTLVTVSS

SEQ ID NO: 1483 - protein, 118 aa, Artificial Sequence
  Description of Artificial Sequence: Synthetic polypeptide
EVQLVESGGGLVQPGGSLRLSCAASGFTFSRYWMGWFRQAPGKEREAVASITSGGSTYYADSVKGRFTISADNSKNTAYLQMNSLKPEDTAVYYCAADVWYGSTWRNWGQGTLVTVSS

SEQ ID NO: 1484 - protein, 118 aa, Artificial Sequence
  Description of Artificial Sequence: Synthetic polypeptide
EVQLVESGGGLVQPGGSLRLSCAASGFTFDRSWMGWFRQAPGKEREWVASITSGGTTNYADSVKGRFTISADNSKNTAYLQMNSLKPEDTAVYYCAADVWYGSTWRNWGQGTLVTVSS

SEQ ID NO: 1485 - protein, 122 aa, Artificial Sequence
  Description of Artificial Sequence: Synthetic polypeptide
EVQLVESGGGLVQPGGSLRLSCAASGYTFRAYVMGWFRQAPGKERELVAVINYRGSSLKYADSVKGRFTISADNSKNTAYLQMNSLKPEDTAVYYCAASEWGGSDYDHDYDWGQGTLVTVSS

SEQ ID NO: 1486 - protein, 123 aa, Artificial Sequence
  Description of Artificial Sequence: Synthetic polypeptide
EVQLVESGGGLVQPGGSLRLSCAASGFTFSTYGMGWFRQAPGKEREFVAAISWSGVSKHYADSVKGRFTISADNSKNTAYLQMNSLKPEDTAVYYCASSPYGPLYRSTHYYDWGQGTLVTVSS

SEQ ID NO: 1487 - protein, 118 aa, Artificial Sequence
  Description of Artificial Sequence: Synthetic polypeptide
EVQLVESGGGLVQPGGSLRLSCAASGFTFSTSWMGWFRQAPGKERELVVSVTSGGYTNYADSVKGRFTISADNSKNTAYLQMNSLKPEDTAVYYCAADVWYGSTWRNWGQGTLVTVSS

SEQ ID NO: 1488 - protein, 118 aa, Artificial Sequence
  Description of Artificial Sequence: Synthetic polypeptide
EVQLVESGGGLVQPGGSLRLSCAASGFTMSSSWMGWFRQAPGKEREWVASINSGGTRNYADSVKGRFTISADNSKNTAYLQMNSLKPEDTAVYYCAADVWYGSTWRNWGQGTLVTVSS

SEQ ID NO: 1489 - protein, 118 aa, Artificial Sequence
  Description of Artificial Sequence: Synthetic polypeptide
EVQLVESGGGLVQPGGSLRLSCAASGFTFSGNWMGWFRQAPGKEREFVASISSGSAINYADSVKGRFTISADNSKNTAYLQMNSLKPEDTAVYYCAADVWYGSTWRNWGQGTLVTVSS

SEQ ID NO: 1490 - protein, 122 aa, Artificial Sequence
  Description of Artificial Sequence: Synthetic polypeptide
EVQLVESGGGLVQPGGSLRLSCAASGRTFGNYAMGWFRQAPGKEREFVADIRSSAGRTYYADSVKGRFTISADNSKNTAYLQMNSLKPEDTAVYYCAASEWGGSDYDHDYDWGQGTLVTVSS

SEQ ID NO: 1491 - protein, 118 aa, Artificial Sequence
  Description of Artificial Sequence: Synthetic polypeptide
EVQLVESGGGLVQPGGSLRLSCAASGFTFSGNWMGWFRQAPGKEREFVAGILSDGRELYADSVKGRFTISADNSKNTAYLQMNSLKPEDTAVYYCAADVWYGSTWRNWGQGTLVTVSS

SEQ ID NO: 1492 - protein, 119 aa, Artificial Sequence
  Description of Artificial Sequence: Synthetic polypeptide
EVQLVESGGGLVQPGGSLRLSCAASGFTLSGNWMGWFRQAPGKEREFVASISSSGISTYYADSVKGRFIISADNSKNTAYLQMNSLKPEDTAVYYCAADVWYGSTWRNWGQGTLVTVSS

SEQ ID NO: 1493 - protein, 121 aa, Artificial Sequence
  Description of Artificial Sequence: Synthetic polypeptide
EVQLVESGGGLVQPGGSLRLSCAASGRTFSTHAMGWFRQAPGKEREFVAAITPINWGGRGTHYADSVKGRFTISADNSKNTAYLQMNSLKPEDNAVYYCAAKRLRSGRWTWGQGTLVTVSS

SEQ ID NO: 1494 - protein, 116 aa, Artificial Sequence
  Description of Artificial Sequence: Synthetic polypeptide
EVQLVESGGGLVQPGGSLRLSCAASGFTFSNSGMGWFRQAPGKEREWVASIYWSSGNTYYADSVKGRFTISADNSKNTAYLQMNSLKPEDTAVYYCANSNKPKFDWGQGTLVTVSS

SEQ ID NO: 1495 - protein, 120 aa, Artificial Sequence
  Description of Artificial Sequence: Synthetic polypeptide
EVQLVESGGGLVQPGGSLRLSCAASGRTFSMGWFRQAPGKEREFVATVRWGTSSTYYADSVKGRFTISADNSKNTAYLQMNSLKPEDTAVYYCAAETFGSGSSLMSEYDWGQGTLVTVSS

SEQ ID NO: 1496 - protein, 116 aa, Artificial Sequence
  Description of Artificial Sequence: Synthetic polypeptide
EVQLVESGGGLVQPGGSLRLSCAASGNIFSRYIMGWFRQAPGKEREWVAGISNGGTTKYADSVKGRFTISADNSKNTAYLQMNSLKPEDTAVYYCAQGWKIVPTNWGQGTLVTVSS

SEQ ID NO: 1497 - protein, 118 aa, Artificial Sequence; identical to SEQ ID NO: 42
  Description of Artificial Sequence: Synthetic polypeptide

SEQ ID NO: 1498 - protein, 123 aa, Artificial Sequence
  Description of Artificial Sequence: Synthetic polypeptide
EVQLVESGGGLVQPGGSLRLSCAASGFTFGHYAMGWFRQAPGKEREFVAAISWSGVSTYYADSVKGRFTISADNSKNTAYLQMNSLKPEDTAVYYCASSPYGPLYRSTHYYDWGQGTLVTVSS

SEQ ID NO: 1499 - protein, 118 aa, Artificial Sequence
  Description of Artificial Sequence: Synthetic polypeptide
EVQLVESGGGLVQPGGSLRLSCAASGRTFSSYHMGWFRQAPGKERELVALISRVGVTSYADSVKGRFTISADNSKNTAYLQMNSLKPEDTAVYYCAAVRTYGSATYDWGQGTLVTVSS

SEQ ID NO: 1500 - protein, 112 aa, Artificial Sequence
  Description of Artificial Sequence: Synthetic polypeptide
EVQLVESGGGLVQPGGSLRLSCAASGRSRMGWFRQAPGKEREFVATISWSGSAVYADSVKGRFTISADNSKNTAYLQMNSLKPEDTAVYYCAAGGRYSARVWGQGTLVTVSS

SEQ ID NO: 1501 - protein, 118 aa, Artificial Sequence
  Description of Artificial Sequence: Synthetic polypeptide
EVQLVESGGGLVQPGGSLRLSCAASGRTYNMGWFRQAPGKEREWVATIYSRSGGSTTYYADSVKGRFTISADNSKNTAYLQMNSLKPEDTAVYYCATYGYDSGRYYSWGQGTLVTVSS

SEQ ID NO: 1502 - protein, 118 aa, Artificial Sequence
  Description of Artificial Sequence: Synthetic polypeptide
EVQLVESGGGLVQPGGSLRLSCAASGFTLSGNWMGWFRQAPGKEREFVASISSGGGTNYADSVKGRFTISADNSKNTAYLQMNSLKPEDTAVYYCAADVWYGSTWRNWGQGTLVTVSS

SEQ ID NO: 1503 - protein, 118 aa, Artificial Sequence; identical to SEQ ID NO: 43
  Description of Artificial Sequence: Synthetic polypeptide

SEQ ID NO: 1504 - protein, 118 aa, Artificial Sequence
  Description of Artificial Sequence: Synthetic polypeptide
EVQLVESGGGLVQPGGSLRLSCAASGFTFSTSWMGWFRQAPGKERELVASITSGGSTNYADSVKGRFTISADNSKNTAYLQMNSLKPEDTAVYYCAADVWYGSTWRNWGQGTLVTVSS

SEQ ID NO: 1505 - protein, 122 aa, Artificial Sequence
  Description of Artificial Sequence: Synthetic polypeptide
EVQLVESGGGLVQPGGSLRLSCAASGRSRYGMGWFRQAPGKEREFVSAISWSGISTYYADSVKGRFTISADNSKNTAYLQMNSLKPEDTAVYYCAATQWGSSGWKQARWYDWGQGTLVTVSS

SEQ ID NO: 1506 - protein, 118 aa, Artificial Sequence
  Description of Artificial Sequence: Synthetic polypeptide
EVQLVESGGGLVQPGGSLRLSCAASGFTFSTSWMGWFRQAPGKERELVASITSGGTTNYADSVKGRFTISADNSKNTAYLQMNSLKPEDTAVYYCAADVWYGSTWRNWGQGTLVTVSS

SEQ ID NO: 1507 - protein, 118 aa, Artificial Sequence
  Description of Artificial Sequence: Synthetic polypeptide
EVQLVESGGGLVQPGGSLRLSCAASGFTFDRSWMGWFRQAPGKERELVASVTSGGTTNYADSVKGRFTISADNSKNTAYLQMNSLKPEDTAVYYCAADVWYGSTWRNWGQGTLVTVSS

SEQ ID NO: 1508 - protein, 121 aa, Artificial Sequence
  Description of Artificial Sequence: Synthetic polypeptide
EVQLVESGGGLVQPGGSLRLSCAASGSIFSINSMGWFRQAPGKEREFVAALSWIIGSTYYADSVKGRFTISADNSKNTAYLQMNSLKPEDTAVYYCAVNGRWRSWSSQRDWGQGTLVTVSS

SEQ ID NO: 1509 - protein, 118 aa, Artificial Sequence
  Description of Artificial Sequence: Synthetic polypeptide
EVQLVESGGGLVQPGGSLRLSCAASGFTFDRSWMGWFRQAPGKERELVASITSGGSTSYADSVKGRFTISADNSKNTAYLQMNSLKPEDTAVYYCAADVWYGSTWRNWGQGTLVTVSS

SEQ ID NO: 1510 - protein, 118 aa, Artificial Sequence
  Description of Artificial Sequence: Synthetic polypeptide
EVQLVESGGGLVQPGGSLRLSCAASGFTFSTSWMGWFRQAPGKERELVAGVNSNGYINYADSVKGRFTISADNSKNTAYLQMNSLKPEDTAVYYCAADVWYGSTWRNWGQGTLVTVSS

SEQ ID NO: 1511 - protein, 116 aa, Artificial Sequence
  Description of Artificial Sequence: Synthetic polypeptide
EVQLVESGGGLVQPGGSLRLSCAASGSTLRDYVMGWFRQAPGKERELVSSISRSGTTMFADSVKGRFTIIADNSKNTAYLLMNSLKPQDTAVYYCAAVFSRGLLTCGQGTLVTVSS

SEQ ID NO: 1512 - protein, 121 aa, Artificial Sequence
  Description of Artificial Sequence: Synthetic polypeptide
EVQLVESGGGLVQPGGSLRLSCAASGGTLSSYIMGWFRQAPGKEREFVAAISGWSGGTTNYADSVKGRFTISADNSKNTAYLQMNSLKPEDTAVYYCAAARFAPGSRGYDWGQGTLVTVSS

SEQ ID NO: 1513 - protein, 118 aa, Artificial Sequence
  Description of Artificial Sequence: Synthetic polypeptide
EVQLVESGGGLVQPGGSLRLSCAASGFTFSTHWMGWFRQAPGKEREFVASIGSSGTTRYADSVKGRFTISADNSKNTAYLQMNSLKPEDTAVYYCAADVWYGSTWRNWGQGTLVTVSS

SEQ ID NO: 1514 - protein, 117 aa, Artificial Sequence
  Description of Artificial Sequence: Synthetic polypeptide
EVQLVESGGGLVQPGGSLRLSCAASGGTFSAFPMGWFRQAPGKERELVAAISSGGTTYYADSVKGRFTISADNSKNTAYLQMNSLKPEDTAVYYCAAQGGVLSAWDWGQGTLLTVSS

SEQ ID NO: 1515 - protein, 118 aa, Artificial Sequence
  Description of Artificial Sequence: Synthetic polypeptide
EVQLVESGGGLVQPGGSLRLSCAASGFTFSGNWMGWFRQAPGKEREWVASISSGGTTNYADSVKGRFTISADNSKNTAYLQMNSLKPEDTAVYYCAADVWYGSTWRNWGQGTLVTVSS

SEQ ID NO: 1516 - protein, 118 aa, Artificial Sequence
  Description of Artificial Sequence: Synthetic polypeptide
EVQLVESGGGLVQPGGSLRLSCAASGFTFSGNWMGWFRQAPGKEREFVAGVNSNGYINYADSVKGRFTISADNSKNTAYLQMNSLKPEDTAVYYCAADVWYGSTWRNWGQGTLVTVSS

SEQ ID NO: 1517 - protein, 118 aa, Artificial Sequence
  Description of Artificial Sequence: Synthetic polypeptide
EVQLVESGGGLVQPGGSLRLSCAASGFTFDRSWMGWFRQAPGKERELVASITSGGTTSYADSVKGRFTISADNSKNTAYLQMNSLKPEDTAVYYCAADVWYGSTWRNWGQGTLVTVSS

SEQ ID NO: 1518 - protein, 118 aa, Artificial Sequence
  Description of Artificial Sequence: Synthetic polypeptide
EVQLVESGGGLVQPGGSLRLSCAASGFTFSGNWMGWFRQAPGKEREWVVGISSGGTPHYADSVKGRFTISADNSKNTAYLQMNSLKPEDTAVYYCAADVWYGSTWRNWGQGTLVTVSS

SEQ ID NO: 1519 - protein, 118 aa, Artificial Sequence
  Description of Artificial Sequence: Synthetic polypeptide
EVQLVESGGGLVQPGGSLRLSCAASGFTLSSNWMGWFRQAPGKERELVAGVNSNGYINYADSVKGRFTISADNSKNTAYLQMNSLKPEDTAVYYCAADVWYGSTWRNWGQGTLVTVSS

SEQ ID NO: 1520 - protein, 118 aa, Artificial Sequence
  Description of Artificial Sequence: Synthetic polypeptide
EVQLVESGGGLVQPGGSLRLSCAASGFDFSVSWMGWFRQAPGKERELVARISSGGELPYYADSVKGRFTISADNSKNTAYLQMNSLKPKHTAVYYCAARPNTRPGSMWGQGTLVTVSS

SEQ ID NO: 1521 - protein, 118 aa, Artificial Sequence
  Description of Artificial Sequence: Synthetic polypeptide
EVQLVESGGGLVQPGGSLRLSCAASGFTMSSSWMGWFRQAPGKEREFVGGISSGGSTYYADSVKGRFTISADNSKNTAYLQMNSLKPEDTAVYYCAADVWYGSTWRNWGQGTLVTVSS

SEQ ID NO: 1522 - protein, 120 aa, Artificial Sequence
  Description of Artificial Sequence: Synthetic polypeptide
EVQLVESGGGLVQPGGSLRLSCAASGRNFRRNSMGWFRQAPGKEREFVAVITRSGGGEVTTYADSVKGRFTISADNSKNTAYLQMNSLKPEDTAVYYCAMSSVTRGSSDWGQGTLVTVSS

SEQ ID NO: 1523 - protein, 118 aa, Artificial Sequence
  Description of Artificial Sequence: Synthetic polypeptide
EVQLVESGGGLVQPGGSLRLSCAASGFTFDRSWMGWFRQAPGKEREFVAGITSSGIPNYADSVKGRFTISADNSKNTAYLQMNSLKPEDTAVYYCAADVWYGSTWRNWGQGTLVTVSS

SEQ ID NO: 1524 - protein, 116 aa, Artificial Sequence
  Description of Artificial Sequence: Synthetic polypeptide
EVQLVESGGGLVQPGGSLRLSCAASGLTISTYNMGWFRQAPGKERELVSAIGWSGASTYYADSVKGRFTISADNSKNTAYLQMNSLKPEDTAVYYCAAFRGRMYDWGQGTLVTVSS

SEQ ID NO: 1525 - protein, 118 aa, Artificial Sequence
  Description of Artificial Sequence: Synthetic polypeptide
EVQLVESGGGLVQPGGSLRLSCAASGFTFSTSWMGWFRQAPGKERELVAAVTSGGNTNYADSVKGRFTISADNSKNTAYLQMNSLKPEDTAVYYCAADVWYGSTWRNWGQGTLVTVSS

SEQ ID NO: 1526 - protein, 116 aa, Artificial Sequence
  Description of Artificial Sequence: Synthetic polypeptide
EVQLVESGGGLVQPGGSLRLSCAASGRTFGDYIMGWFRQAPGKERELVAEITRVGNTNYADSVKGRFTISADNSKNTAYLQMNSLKPEDTAVYYCAAVFSRGPLTWGQGTLVTVSS

SEQ ID NO: 1527 - protein, 120 aa, Artificial Sequence; identical to SEQ ID NO: 44
  Description of Artificial Sequence: Synthetic polypeptide

SEQ ID NO: 1528 - protein, 115 aa, Artificial Sequence
  Description of Artificial Sequence: Synthetic polypeptide
QVQLVQSGAEVKKPGSSVKVSCKASGGIFSSYAISWVRQAPGQGLEWMGGIIPTNYAQKFQGRVTITADESTSTAYMELSSLRSEDTAVYYCARWRGGLSAFDVWGQGTLVTVSS

SEQ ID NO: 1529 - protein, 120 aa, Artificial Sequence
  Description of Artificial Sequence: Synthetic polypeptide
QVQLVQSGAEVKKPGSSVKVSCKASGGTYTTHGISWVRQAPGQGLEWMGGIIPINYAQKFQGRVTITADESTSTAYMELSSLRSEDTAVYYCARAFGLASGKGPGVFDYWGQGTLVTVSS

SEQ ID NO: 1530 - protein, 116 aa, Artificial Sequence
  Description of Artificial Sequence: Synthetic polypeptide
EVQLLESGGGLVQPGGSLRLSCAASGFSFGSYAMSWVRQAPGKGLEWVSAITGSYYADSVKGRFTISRDNSKNTLYLQMNSLRAEDTAVYYCARVLGNSGRGLDYWGQGTLVTVSS

SEQ ID NO: 1531 - protein, 116 aa, Artificial Sequence
  Description of Artificial Sequence: Synthetic polypeptide
QVQLVQSGAEVKKPGSSVKVSCKASGGPFNKYAISWVRQAPGQGLEWMGGIIPMNYAQKFQGRVTITADESTSTAYMELSSLRSEDTAVYYCARGSHQLYYAFEYWGQGTLVTVSS

SEQ ID NO: 1532 - protein, 117 aa, Artificial Sequence
  Description of Artificial Sequence: Synthetic polypeptide
EVQLLESGGGLVQPGGSLRLSCAASGFTFSTYLMIWVRQAPGKGLEWVSAISGSYYADSVKGRFTISRDNSKNTLYLQMNSLRAEDTAVYYCARDVEGQVGHFFDPWGQGTLVTVSS

SEQ ID NO: 1533 - protein, 121 aa, Artificial Sequence
  Description of Artificial Sequence: Synthetic polypeptide
EVQLLESGGGLVQPGGSLRLSCAASGFTLSSYSMSWVRQAPGKGLEWVSAINPSYYADSVKGRFTISRDNSKNTLYLQMNSLRAEDTAVYYCAKGIKAFGGTRLPLYFDSWGQGTLVTVSS

SEQ ID NO: 1534 - protein, 116 aa, Artificial Sequence
  Description of Artificial Sequence: Synthetic polypeptide
EVQLLESGGGLVQPGGSLRLSCAASGFTFGNYAMSWVRQAPGKGLEWVSAITGSYYADSVKGRFTISRDNSKNTLYLQMNSLRAEDTAVYYCAKHLLSRSRGLDVWGQGTLVTVSS

SEQ ID NO: 1535 - protein, 116 aa, Artificial Sequence
  Description of Artificial Sequence: Synthetic polypeptide
EVQLLESGGGLVQPGGSLRLSCAASGFTFGTYSMSWVRQAPGKGLEWVSAITGSYYADSVKGRFTISRDNSKNTLYLQMNSLRAEDTAVYYCAKHLLARSGGMHLWGQGTLVTVSS

SEQ ID NO: 1536 - protein, 114 aa, Artificial Sequence
  Description of Artificial Sequence: Synthetic polypeptide
EVQLLESGGGLVQPGGSLRLSCAASGFSFSNHAMSWVRQAPGKGLEWVSAISGSYYADSVKGRFTISRDNSKNTLYLQMNSLRAEDTAVYYCARSTRDRAFDYWGQGTLVTVSS

SEQ ID NO: 1537 - protein, 114 aa, Artificial Sequence
  Description of Artificial Sequence: Synthetic polypeptide
EVQLLESGGGLVQPGGSLRLSCAASGFSFSSSGMSWVRQAPGKGLEWVSAISGSYYADSVKGRFTISRDNSKNTLYLQMNSLRAEDTAVYYCVKVGDYFAFDHWGQGTLVTVSS

SEQ ID NO: 1538 - protein, 116 aa, Artificial Sequence
  Description of Artificial Sequence: Synthetic polypeptide
QVQLVQSGAEVKKPGSSVKVSCKASGGTFRRHAISWVRQAPGQGLEWMGGIIPMNYAQKFQGRVTITADESTSTAYMELSSLRSEDTAVYYCARGTALVRRAFDIWGQGTLVTVSS

SEQ ID NO: 1539 - protein, 120 aa, Artificial Sequence; identical to SEQ ID NO: 1529
  Description of Artificial Sequence: Synthetic polypeptide

SEQ ID NO: 1540 - protein, 115 aa, Artificial Sequence
  Description of Artificial Sequence: Synthetic polypeptide
EVQLLESGGGLVQPGGSLRLSCAASGFTFSNYAMSWVRQAPGKGLEWVSAISGGYYADSVKGRFTISRDNSKNTLYLQMNSLRAEDTAVYYCAKHRVGARAFDVWGQGTLVTVSS

SEQ ID NO: 1541 - protein, 115 aa, Artificial Sequence
  Description of Artificial Sequence: Synthetic polypeptide
EVQLLESGGGLVQPGGSLRLSCAASGFTFSNYAMSWVRQAPGKGLEWVSAISGNYYADSVKGRFTISRDNSKNTLYLQMNSLRAEDTAVYYCAKHRVGARAFDVWGQGTLVTVSS

SEQ ID NO: 1542 - protein, 117 aa, Artificial Sequence
  Description of Artificial Sequence: Synthetic polypeptide
QVQLVQSGAEVKKPGSSVKVSCKASGGTFNIYAISWVRQAPGQGLEWMGGIIPINYAQKFQGRVTITADESTSTAYMELSSLRSEDTAVYYCARHPRDFGIHGLDVWGQGTLVTVSS

SEQ ID NO: 1543 - protein, 114 aa, Artificial Sequence
  Description of Artificial Sequence: Synthetic polypeptide
QVQLVQSGAEVKKPGSSVKVSCKASGGTFSRYGISWVRQAPGQGLEWMGGIIPINYAQKFQGRVTITADESTSTAYMELSSLRSEDTAVYYCARVRGGYYYDTWGQGTLVTVSS

SEQ ID NO: 1544 - protein, 116 aa, Artificial Sequence
  Description of Artificial Sequence: Synthetic polypeptide
QVQLVQSGAEVKKPGSSVKVSCKASGGTFTNHAISWVRQAPGQGLEWMGGINPLNYAQKFQGRVTITADESTSTAYMELSSLRSEDTAVYYCATGGGHFRSGRDVWGQGTLVTVSS

SEQ ID NO: 1545 - protein, 115 aa, Artificial Sequence
  Description of Artificial Sequence: Synthetic polypeptide
EVQLLESGGGLVQPGGSLRLSCAASGFTFASYAMSWVRQAPGKGLEWVSAITNSYYADSVKGRFTISRDNSKNTLYLQMNSLRAEDTAVYYCARHLRLGRGFDSWGQGTLVTVSS

SEQ ID NO: 1546 - protein, 116 aa, Artificial Sequence
  Description of Artificial Sequence: Synthetic polypeptide
QVQLVQSGAEVKKPGSSVKVSCKASGGTFTYYPISWVRQAPGQGLEWMGGIIPFNYAQKFQGRVTITADESTSTAYMELSSLRSEDTAVYYCATPSGGIGRRLDVWGQGTLVTVSS

SEQ ID NO: 1547 - protein, 120 aa, Artificial Sequence
  Description of Artificial Sequence: Synthetic polypeptide
QVQLVQSGAEVKKPGSSVKVSCKASGGTYTTHGISWVRQAPGQGLEWMGGIIPINYAQKFQGRVTITADESTSTAYMELSSLRSEDTAVYYCAKAFGLASGKGPGVFDYWGQGTLVTVSS

SEQ ID NO: 1548 - protein, 119 aa, Artificial Sequence
  Description of Artificial Sequence: Synthetic polypeptide
QVQLVQSGAEVKKPGSSVKVSCKASGGTFSQYAISWVRQAPGQGLEWMGGIIPMNYAQKFQGRVTITADESTSTAYMELSSLRSEDTAVYYCARESRTLFGVPNAFDIWGQGTLVTVSS

SEQ ID NO: 1549 - protein, 112 aa, Artificial Sequence
  Description of Artificial Sequence: Synthetic polypeptide
DIQMTQSPSSLSASVGDRVTITCRSSQSLVHSTGNTYLHWYQQKPGKAPKLLIYAASDLESGVPSRFSGSGSGTDFTLTISSLQPEDFATYYCQQGHTLPWTFGQGTKVEIK

SEQ ID NO: 1550 - protein, 107 aa, Artificial Sequence
  Description of Artificial Sequence: Synthetic polypeptide
DIQMTQSPSSLSASVGDRVTITCRTSQDIGNYLNWYQQKPGKAPKLLIYPKHNRPPGVPSRFSGSGSGTDFTLTISSLQPEDFATYYCQQSYNSPWTFGQGTKVEIK

SEQ ID NO: 1551 - protein, 112 aa, Artificial Sequence; identical to SEQ ID NO: 1549
  Description of Artificial Sequence: Synthetic polypeptide

SEQ ID NO: 1552 - protein, 112 aa, Artificial Sequence; identical to SEQ ID NO: 1549
  Description of Artificial Sequence: Synthetic polypeptide

SEQ ID NO: 1553 - protein, 112 aa, Artificial Sequence; identical to SEQ ID NO: 1549
  Description of Artificial Sequence: Synthetic polypeptide

SEQ ID NO: 1554 - protein, 112 aa, Artificial Sequence; identical to SEQ ID NO: 1549
  Description of Artificial Sequence: Synthetic polypeptide

SEQ ID NO: 1555 - protein, 111 aa, Artificial Sequence
  Description of Artificial Sequence: Synthetic polypeptide
DIQMTQSPSSLSASVGDRVTITCSGDKLRNKYASWYQQKPGKAPKLLIYGQHNRPSGVPSRFSGSGSGTDFTLTISSLQPEDFATYYCQGSYYSGSGWYYAFGQGTKVEIK

SEQ ID NO: 1556 - protein, 112 aa, Artificial Sequence; identical to SEQ ID NO: 1549
  Description of Artificial Sequence: Synthetic polypeptide

SEQ ID NO: 1557 - protein, 112 aa, Artificial Sequence; identical to SEQ ID NO: 1549
  Description of Artificial Sequence: Synthetic polypeptide

SEQ ID NO: 1558 - protein, 112 aa, Artificial Sequence; identical to SEQ ID NO: 1549
  Description of Artificial Sequence: Synthetic polypeptide

SEQ ID NO: 1559 - protein, 112 aa, Artificial Sequence; identical to SEQ ID NO: 1549
  Description of Artificial Sequence: Synthetic polypeptide

SEQ ID NO: 1560 - protein, 110 aa, Artificial Sequence
  Description of Artificial Sequence: Synthetic polypeptide
DIQMTQSPSSLSASVGDRVTITCSGDKLGHTYTSWYQQKPGKAPKLLIYYTSSLHSGVPSRFSGSGSGTDFTLTISSLQPEDFATYYCATRAVRGNPHVLFGQGTKVEIK

SEQ ID NO: 1561 - protein, 107 aa, Artificial Sequence
  Description of Artificial Sequence: Synthetic polypeptide
DIQMTQSPSSLSASVGDRVTITCRASQSIREYLHWYQQKPGKAPKLLIYFGSELRKGVPSRFSGSGSGTDFTLTISSLQPEDFATYYCGQGVLWPATFGQGTKVEIK

SEQ ID NO: 1562 - protein, 106 aa, Artificial Sequence
  Description of Artificial Sequence: Synthetic polypeptide
DIQMTQSPSSLSASVGDRVTITCSGDTLGGKYAWWYQQKPGKAPKLLIYQNDKRPSGVPSRFSGSGSGTDFTLTISSLQPEDFATYYCHQWSSYPTFGQGTKVEIK

SEQ ID NO: 1563 - protein, 111 aa, Artificial Sequence
  Description of Artificial Sequence: Synthetic polypeptide
DIQMTQSPSSLSASVGDRVTITCQSSQSVYSNNELSWYQQKPGKAPKLLIYGTSYRYSGVPSRFSGSGSGTDFTLTISSLQPEDFATYYCSSWAGSRSGTVFGQGTKVEIK

SEQ ID NO: 1564 - protein, 107 aa, Artificial Sequence
  Description of Artificial Sequence: Synthetic polypeptide
DIQMTQSPSSLSASVGDRVTITCSGDKLGHTYTSWYQQKPGKAPKLLIYRTSWLQSGVPSRFSGSGSGTDFTLTISSLQPEDFATYYCQQYHSYPPTFGQGTKVEIK

SEQ ID NO: 1565 - protein, 107 aa, Artificial Sequence
  Description of Artificial Sequence: Synthetic polypeptide
DIQMTQSPSSLSASVGDRVTITCRASQTIERRLNWYQQKPGKAPKLLIYQNDKRPSGVPSRFSGSGSGTDFTLTISSLQPEDFATYYCQQSYSIPPTFGQGTKVEIK

SEQ ID NO: 1566 - protein, 107 aa, Artificial Sequence
  Description of Artificial Sequence: Synthetic polypeptide
DIQMTQSPSSLSASVGDRVTITCSGDKLGDKYTSWYQQKPGKAPKLLIYHTSRLQDGVPSRFSGSGSGTDFTLTISSLQPEDFATYYCQQSYNLPLTFGQGTKVEIK

SEQ ID NO: 1567 - protein, 112 aa, Artificial Sequence; identical to SEQ ID NO: 1549
  Description of Artificial Sequence: Synthetic polypeptide

SEQ ID NO: 1568 - protein, 112 aa, Artificial Sequence; identical to SEQ ID NO: 1549
  Description of Artificial Sequence: Synthetic polypeptide

SEQ ID NO: 1569 - protein, 112 aa, Artificial Sequence; identical to SEQ ID NO: 1549
  Description of Artificial Sequence: Synthetic polypeptide

SEQ ID NO: 1570 - protein, 107 aa, Artificial Sequence
  Description of Artificial Sequence: Synthetic polypeptide
DIQMTQSPSSLSASVGDRVTITCRASQGVRTSLAWYQQKPGKAPKLLIYAKNNRPSGVPSRFSGSGSGTDFTLTISSLQPEDFATYYCQQSYHTPQTFGQGTKVEIK

SEQ ID NO: 1571 - protein, 112 aa, Artificial Sequence; identical to SEQ ID NO: 1549
  Description of Artificial Sequence: Synthetic polypeptide

SEQ ID NO: 1572 - protein, 112 aa, Artificial Sequence; identical to SEQ ID NO: 1549
  Description of Artificial Sequence: Synthetic polypeptide

SEQ ID NO: 1573 - protein, 107 aa, Artificial Sequence
  Description of Artificial Sequence: Synthetic polypeptide
DIQMTQSPSSLSASVGDRVTITCRASQTIERRLNWYQQKPGKAPKLLIYAKNNRPSGVPSRFSGSGSGTDFTLTISSLQPEDFATYYCQQTALVPYTFGQGTKVEIK

SEQ ID NO: 1574 - protein, 107 aa, Artificial Sequence
  Description of Artificial Sequence: Synthetic polypeptide
DIQMTQSPSSLSASVGDRVTITCRASQTIGDYLNWYQQKPGKAPKLLIYGASSRATGVPSRFSGSGSGTDFTLTISSLQPEDFATYYCAQGAALPRTFGQGTKVEIK

SEQ ID NO: 1575 - protein, 112 aa, Artificial Sequence; identical to SEQ ID NO: 1549
  Description of Artificial Sequence: Synthetic polypeptide

SEQ ID NO: 1576 - protein, 107 aa, Artificial Sequence
  Description of Artificial Sequence: Synthetic polypeptide
DIQMTQSPSSLSASVGDRVTITCQGASLRNYYASWYQQKPGKAPKLLIYDTSKVASGVPSRFSGSGSGTDFTLTISSLQPEDFATYYCFQGSHIPYTFGQGTKVEIK

SEQ ID NO: 1577 - protein, 107 aa, Artificial Sequence
  Description of Artificial Sequence: Synthetic polypeptide
DIQMTQSPSSLSASVGDRVTITCRASQSISNNLNWYQQKPGKAPKLLIYAKNNRPSGVPSRFSGSGSGTDFTLTISSLQPEDFATYYCQQSYTTPPTFGQGTKVEIK

SEQ ID NO: 1578 - protein, 107 aa, Artificial Sequence
  Description of Artificial Sequence: Synthetic polypeptide
DIQMTQSPSSLSASVGDRVTITCRASQPIGPDLLWYQQKPGKAPKLLIYRKSNRPSGVPSRFSGSGSGTDFTLTISSLQPEDFATYYCQQSYSTPYTFGQGTKVEIK

SEQ ID NO: 1579 - protein, 107 aa, Artificial Sequence
  Description of Artificial Sequence: Synthetic polypeptide
DIQMTQSPSSLSASVGDRVTITCRASQSIRRFLNWYQQKPGKAPKLLIYWASDRESGVPSRFSGSGSGTDFTLTISSLQPEDFATYYCQQTATWPFTFGQGTKVEIK

SEQ ID NO: 1580 - protein, 112 aa, Artificial Sequence; identical to SEQ ID NO: 1549
  Description of Artificial Sequence: Synthetic polypeptide

SEQ ID NO: 1581 - protein, 112 aa, Artificial Sequence; identical to SEQ ID NO: 1549
  Description of Artificial Sequence: Synthetic polypeptide

SEQ ID NO: 1582 - protein, 107 aa, Artificial Sequence
  Description of Artificial Sequence: Synthetic polypeptide
DIQMTQSPSSLSASVGDRVTITCRANQNIGNFLNWYQQKPGKAPKLLIYQDFKRPSGVPSRFSGSGSGTDFTLTISSLQPEDFATYYCHQRSSYPWTFGQGTKVEIK

SEQ ID NO: 1583 - protein, 110 aa, Artificial Sequence
  Description of Artificial Sequence: Synthetic polypeptide
DIQMTQSPSSLSASVGDRVTITCSGNKLGDKYASWYQQKPGKAPKLLIYRTSWLQSGVPSRFSGSGSGTDFTLTISSLQPEDFATYYCVARAVRGNPHVLFGQGTKVEIK

SEQ ID NO: 1584 - protein, 112 aa, Artificial Sequence; identical to SEQ ID NO: 1549
  Description of Artificial Sequence: Synthetic polypeptide

SEQ ID NO: 1585 - protein, 112 aa, Artificial Sequence; identical to SEQ ID NO: 1549
  Description of Artificial Sequence: Synthetic polypeptide

SEQ ID NO: 1586 - protein, 112 aa, Artificial Sequence; identical to SEQ ID NO: 1549
  Description of Artificial Sequence: Synthetic polypeptide

SEQ ID NO: 1587 - protein, 112 aa, Artificial Sequence; identical to SEQ ID NO: 1549
  Description of Artificial Sequence: Synthetic polypeptide

SEQ ID NO: 1588 - protein, 107 aa, Artificial Sequence
  Description of Artificial Sequence: Synthetic polypeptide
DIQMTQSPSSLSASVGDRVTITCRASQDIGNFLNWYQQKPGKAPKLLIYRTSWLQSGVPSRFSGSGSGTDFTLTISSLQPEDFATYYCQQRSSYPPTFGQGTKVEIK

SEQ ID NO: 1589 - protein, 112 aa, Artificial Sequence; identical to SEQ ID NO: 1549
  Description of Artificial Sequence: Synthetic polypeptide

SEQ ID NO: 1590 - protein, 107 aa, Artificial Sequence
  Description of Artificial Sequence: Synthetic polypeptide
DIQMTQSPSSLSASVGDRVTITCRASQGVRTSLAWYQQKPGKAPKLLIYGKNIRPSGVPSRFSGSGSGTDFTLTISSLQPEDFATYYCQQSYSFPLTFGQGTKVEIK

SEQ ID NO: 1591 - protein, 107 aa, Artificial Sequence
  Description of Artificial Sequence: Synthetic polypeptide
DIQMTQSPSSLSASVGDRVTITCRASQSIRRYLNWYQQKPGKAPKLLIYWASDRESGVPSRFSGSGSGTDFTLTISSLQPEDFATYYCQQSFSTPLTFGQGTKVEIK

SEQ ID NO: 1592 - protein, 112 aa, Artificial Sequence; identical to SEQ ID NO: 1549
  Description of Artificial Sequence: Synthetic polypeptide

SEQ ID NO: 1593 - protein, 107 aa, Artificial Sequence
  Description of Artificial Sequence: Synthetic polypeptide
DIQMTQSPSSLSASVGDRVTITCRASQSIRRYLNWYQQKPGKAPKLLIYDASNLQSGVPSRFSGSGSGTDFTLTISSLQPEDFATYYCQQSYDFPRTFGQGTKVEIK

SEQ ID NO: 1594 - protein, 112 aa, Artificial Sequence; identical to SEQ ID NO: 1549
  Description of Artificial Sequence: Synthetic polypeptide

SEQ ID NO: 1595 - protein, 112 aa, Artificial Sequence; identical to SEQ ID NO: 1549
  Description of Artificial Sequence: Synthetic polypeptide

SEQ ID NO: 1596 - protein, 112 aa, Artificial Sequence; identical to SEQ ID NO: 1549
  Description of Artificial Sequence: Synthetic polypeptide

SEQ ID NO: 1597 - protein, 112 aa, Artificial Sequence; identical to SEQ ID NO: 1549
  Description of Artificial Sequence: Synthetic polypeptide

SEQ ID NO: 1598 - protein, 112 aa, Artificial Sequence; identical to SEQ ID NO: 1549
  Description of Artificial Sequence: Synthetic polypeptide

SEQ ID NO: 1599 - protein, 107 aa, Artificial Sequence
  Description of Artificial Sequence: Synthetic polypeptide
DIQMTQSPSSLSASVGDRVTITCRASQGVRTSLAWYQQKPGKAPKLLIYAKNNRPSGVPSRFSGSGSGTDFTLTISSLQPEDFATYYCQQSYSAPYTFGQGTKVEIK

SEQ ID NO: 1600 - protein, 112 aa, Artificial Sequence; identical to SEQ ID NO: 1549
  Description of Artificial Sequence: Synthetic polypeptide

SEQ ID NO: 1601 - protein, 107 aa, Artificial Sequence
  Description of Artificial Sequence: Synthetic polypeptide
DIQMTQSPSSLSASVGDRVTITCRASQTIGDYLNWYQQKPGKAPKLLIYGQHNRPSGVPSRFSGSGSGTDFTLTISSLQPEDFATYYCQQSFSIPWTFGQGTKVEIK

SEQ ID NO: 1602 - protein, 107 aa, Artificial Sequence
  Description of Artificial Sequence: Synthetic polypeptide
DIQMTQSPSSLSASVGDRVTITCKASDHIGKFLTWYQQKPGKAPKLLIYAASKLASGVPSRFSGSGSGTDFTLTISSLQPEDFATYYCQQVVWRPFTFGQGTKVEIK

SEQ ID NO: 1603 - protein, 107 aa, Artificial Sequence
  Description of Artificial Sequence: Synthetic polypeptide
DIQMTQSPSSLSASVGDRVTITCRASQTIGDYLNWYQQKPGKAPKLLIYHDNKRPSGVPSRFSGSGSGTDFTLTISSLQPEDFATYYCQQDAFHPPTFGQGTKVEIK

SEQ ID NO: 1604 - protein, 112 aa, Artificial Sequence; identical to SEQ ID NO: 1549
  Description of Artificial Sequence: Synthetic polypeptide

SEQ ID NO: 1605 - protein, 112 aa, Artificial Sequence
  Description of Artificial Sequence: Synthetic polypeptide
DIQMTQSPSSLSASVGDRVTITCRSSQSLVHSTGNTYLHWYQQKPGKAPKLLIYGKNIRPSGVPSRFSGSGSGTDFTLTISSLQPEDFATYYCQQSYTTPWTFGQGTKVEIK

SEQ ID NO: 1606 - protein, 112 aa, Artificial Sequence; identical to SEQ ID NO: 1549
  Description of Artificial Sequence: Synthetic polypeptide

SEQ ID NO: 1607 - protein, 112 aa, Artificial Sequence; identical to SEQ ID NO: 1549
  Description of Artificial Sequence: Synthetic polypeptide

SEQ ID NO: 1608 - protein, 112 aa, Artificial Sequence; identical to SEQ ID NO: 1549
  Description of Artificial Sequence: Synthetic polypeptide

SEQ ID NO: 1609 - protein, 112 aa, Artificial Sequence; identical to SEQ ID NO: 1549
  Description of Artificial Sequence: Synthetic polypeptide

SEQ ID NO: 1610 - protein, 112 aa, Artificial Sequence; identical to SEQ ID NO: 1549
  Description of Artificial Sequence: Synthetic polypeptide

SEQ ID NO: 1611 - protein, 112 aa, Artificial Sequence; identical to SEQ ID NO: 1549
  Description of Artificial Sequence: Synthetic polypeptide

SEQ ID NO: 1612 - protein, 112 aa, Artificial Sequence; identical to SEQ ID NO: 1549
  Description of Artificial Sequence: Synthetic polypeptide

SEQ ID NO: 1613 - protein, 112 aa, Artificial Sequence; identical to SEQ ID NO: 1549
  Description of Artificial Sequence: Synthetic polypeptide

SEQ ID NO: 1614 - protein, 112 aa, Artificial Sequence; identical to SEQ ID NO: 1549
  Description of Artificial Sequence: Synthetic polypeptide

SEQ ID NO: 1615 - protein, 112 aa, Artificial Sequence; identical to SEQ ID NO: 1549
  Description of Artificial Sequence: Synthetic polypeptide

SEQ ID NO: 1616 - protein, 112 aa, Artificial Sequence; identical to SEQ ID NO: 1549
  Description of Artificial Sequence: Synthetic polypeptide

SEQ ID NO: 1617 - protein, 107 aa, Artificial Sequence
  Description of Artificial Sequence: Synthetic polypeptide
DIQMTQSPSSLSASVGDRVTITCRASQNIRSYLNWYQQKPGKAPKLLIYGASTLQSGVPSRFSGSGSGTDFTLTISSLQPEDFATYYCQQSYENPLTFGQGTKVEIK

SEQ ID NO: 1618 - protein, 112 aa, Artificial Sequence; identical to SEQ ID NO: 1549
  Description of Artificial Sequence: Synthetic polypeptide

SEQ ID NO: 1619 - protein, 112 aa, Artificial Sequence; identical to SEQ ID NO: 1549
  Description of Artificial Sequence: Synthetic polypeptide

SEQ ID NO: 1620 - protein, 107 aa, Artificial Sequence
  Description of Artificial Sequence: Synthetic polypeptide
DIQMTQSPSSLSASVGDRVTITCRASHNINSYLNWYQQKPGKAPKLLIYGKNIRPSGVPSRFSGSGSGTDFTLTISSLQPEDFATYYCQQSYIIPPTFGQGTKVEIK

SEQ ID NO: 1621 - protein, 112 aa, Artificial Sequence; identical to SEQ ID NO: 1549
  Description of Artificial Sequence: Synthetic polypeptide

SEQ ID NO: 1622 - protein, 112 aa, Artificial Sequence; identical to SEQ ID NO: 1549
  Description of Artificial Sequence: Synthetic polypeptide

SEQ ID NO: 1623 - protein, 112 aa, Artificial Sequence; identical to SEQ ID NO: 1549
  Description of Artificial Sequence: Synthetic polypeptide

SEQ ID NO: 1624 - protein, 112 aa, Artificial Sequence; identical to SEQ ID NO: 1549
  Description of Artificial Sequence: Synthetic polypeptide

SEQ ID NO: 1625 - protein, 107 aa, Artificial Sequence
  Description of Artificial Sequence: Synthetic polypeptide
DIQMTQSPSSLSASVGDRVTITCRASQSVRSYLNWYQQKPGKAPKLLIYAASSLYSGVPSRFSGSGSGTDFTLTISSLQPEDFATYYCQQYASVPVTFGQGTKVEIK

SEQ ID NO: 1626 - protein, 112 aa, Artificial Sequence; identical to SEQ ID NO: 1549
  Description of Artificial Sequence: Synthetic polypeptide

SEQ ID NO: 1627 - protein, 107 aa, Artificial Sequence
  Description of Artificial Sequence: Synthetic polypeptide
DIQMTQSPSSLSASVGDRVTITCRASQSVRSYLNWYQQKPGKAPKLLIYAATTLQSGVPSRFSGSGSGTDFTLTISSLQPEDFATYYCQQSYIIPPTFGQGTKVEIK

SEQ ID NO: 1628 - protein, 107 aa, Artificial Sequence
  Description of Artificial Sequence: Synthetic polypeptide
DIQMTQSPSSLSASVGDRVTITCRASQGVRTSLAWYQQKPGKAPKLLIYGKNIRPSGVPSRFSGSGSGTDFTLTISSLQPEDFATYYCQQGYRWPVTFGQGTKVEIK

SEQ ID NO: 1629 - protein, 112 aa, Artificial Sequence; identical to SEQ ID NO: 1549
  Description of Artificial Sequence: Synthetic polypeptide

SEQ ID NO: 1630 - protein, 112 aa, Artificial Sequence; identical to SEQ ID NO: 1549
  Description of Artificial Sequence: Synthetic polypeptide

SEQ ID NO: 1631 - protein, 110 aa, Artificial Sequence
  Description of Artificial Sequence: Synthetic polypeptide
DIQMTQSPSSLSASVGDRVTITCSGDKLGDKYTSWYQQKPGKAPKLLIYGASSRATGVPSRFSGSGSGTDFTLTISSLQPEDFATYYCMSRSIWGNPHVLFGQGTKVEIK

SEQ ID NO: 1632 - protein, 110 aa, Artificial Sequence; identical to SEQ ID NO: 1560
  Description of Artificial Sequence: Synthetic polypeptide

SEQ ID NO: 1633 - protein, 112 aa, Artificial Sequence; identical to SEQ ID NO: 1549
  Description of Artificial Sequence: Synthetic polypeptide

SEQ ID NO: 1634 - protein, 112 aa, Artificial Sequence; identical to SEQ ID NO: 1549
  Description of Artificial Sequence: Synthetic polypeptide

SEQ ID NO: 1635 - protein, 107 aa, Artificial Sequence
  Description of Artificial Sequence: Synthetic polypeptide
DIQMTQSPSSLSASVGDRVTITCRASQTIGDYLNWYQQKPGKAPKLLIYQDFKRPSGVPSRFSGSGSGTDFTLTISSLQPEDFATYYCQQYHDFPLTFGQGTKVEIK

SEQ ID NO: 1636 - protein, 112 aa, Artificial Sequence; identical to SEQ ID NO: 1549
  Description of Artificial Sequence: Synthetic polypeptide

SEQ ID NO: 1637 - protein, 112 aa, Artificial Sequence; identical to SEQ ID NO: 1549
  Description of Artificial Sequence: Synthetic polypeptide

SEQ ID NO: 1638 - protein, 107 aa, Artificial Sequence
  Description of Artificial Sequence: Synthetic polypeptide
DIQMTQSPSSLSASVGDRVTITCSGDRLGEKYVSWYQQKPGKAPKLLIYGTTSLESGVPSRFSGSGSGTDFTLTISSLQPEDFATYYCQQGYTLPWTFGQGTKVEIK

SEQ ID NO: 1639 - protein, 107 aa, Artificial Sequence
  Description of Artificial Sequence: Synthetic polypeptide
DIQMTQSPSSLSASVGDRVTITCRASQSIREYLHWYQQKPGKAPKLLIYFGSELRKGVPSRFSGSGSGTDFTLTISSLQPEDFATYYCQNGHSFPLTFGQGTKVEIK

SEQ ID NO: 1640 - protein, 112 aa, Artificial Sequence; identical to SEQ ID NO: 1549
  Description of Artificial Sequence: Synthetic polypeptide

SEQ ID NO: 1641 - protein, 107 aa, Artificial Sequence
  Description of Artificial Sequence: Synthetic polypeptide
DIQMTQSPSSLSASVGDRVTITCSASQDINKYLNWYQQKPGKAPKLLIYHTSRLQSGVPSRFSGSGSGTDFTLTISSLQPEDFATYYCQQFAYFPATFGQGTKVEIK

SEQ ID NO: 1642 - protein, 112 aa, Artificial Sequence; identical to SEQ ID NO: 1549
  Description of Artificial Sequence: Synthetic polypeptide

SEQ ID NO: 1643 - protein, 107 aa, Artificial Sequence; identical to SEQ ID NO: 1599
  Description of Artificial Sequence: Synthetic polypeptide

SEQ ID NO: 1644 - protein, 112 aa, Artificial Sequence; identical to SEQ ID NO: 1549
  Description of Artificial Sequence: Synthetic polypeptide

SEQ ID NO: 1645 - protein, 112 aa, Artificial Sequence; identical to SEQ ID NO: 1549
  Description of Artificial Sequence: Synthetic polypeptide

SEQ ID NO: 1646 - protein, 107 aa, Artificial Sequence
  Description of Artificial Sequence: Synthetic polypeptide
DIQMTQSPSSLSASVGDRVTITCRASHFIGSLLSWYQQKPGKAPKLLIYETSKLASGVPSRFSGSGSGTDFTLTISSLQPEDFATYYCQQSYSYPRTFGQGTKVEIK

SEQ ID NO: 1647 - protein, 112 aa, Artificial Sequence; identical to SEQ ID NO: 1549
  Description of Artificial Sequence: Synthetic polypeptide

SEQ ID NO: 1648 - protein, 112 aa, Artificial Sequence; identical to SEQ ID NO: 1549
  Description of Artificial Sequence: Synthetic polypeptide

SEQ ID NO: 1649 - protein, 112 aa, Artificial Sequence; identical to SEQ ID NO: 1549
  Description of Artificial Sequence: Synthetic polypeptide

SEQ ID NO: 1650 - protein, 107 aa, Artificial Sequence; identical to SEQ ID NO: 1577
  Description of Artificial Sequence: Synthetic polypeptide

SEQ ID NO: 1651 - protein, 112 aa, Artificial Sequence; identical to SEQ ID NO: 1549
  Description of Artificial Sequence: Synthetic polypeptide

SEQ ID NO: 1652 - protein, 107 aa, Artificial Sequence
  Description of Artificial Sequence: Synthetic polypeptide
DIQMTQSPSSLSASVGDRVTITCRASQSISNNLNWYQQKPGKAPKLLIYDASSSQSGVPSRFSGSGSGTDFTLTISSLQPEDFATYYCQQSSSTPWTFGQGTKVEIK

SEQ ID NO: 1653 - protein, 112 aa, Artificial Sequence; identical to SEQ ID NO: 1549
  Description of Artificial Sequence: Synthetic polypeptide

SEQ ID NO: 1654 - protein, 112 aa, Artificial Sequence; identical to SEQ ID NO: 1549
  Description of Artificial Sequence: Synthetic polypeptide

SEQ ID NO: 1655 - protein, 112 aa, Artificial Sequence; identical to SEQ ID NO: 1549
  Description of Artificial Sequence: Synthetic polypeptide

SEQ ID NO: 1656 - protein, 112 aa, Artificial Sequence; identical to SEQ ID NO: 1549
  Description of Artificial Sequence: Synthetic polypeptide

SEQ ID NO: 1657 - protein, 112 aa, Artificial Sequence; identical to SEQ ID NO: 1549
  Description of Artificial Sequence: Synthetic polypeptide

SEQ ID NO: 1658 - protein, 107 aa, Artificial Sequence
  Description of Artificial Sequence: Synthetic polypeptide
DIQMTQSPSSLSASVGDRVTITCRASQTIERRLNWYQQKPGKAPKLLIYGTTSLESGVPSRFSGSGSGTDFTLTISSLQPEDFATYYCQQSYTTLWTFGQGTKVEIK

SEQ ID NO: 1659 - protein, 107 aa, Artificial Sequence
  Description of Artificial Sequence: Synthetic polypeptide
DIQMTQSPSSLSASVGDRVTITCSGDNLRGYYASWYQQKPGKAPKLLIYGTSYRYSGVPSRFSGSGSGTDFTLTISSLQPEDFATYYCQQNLAPPYTFGQGTKVEIK

SEQ ID NO: 1660 - protein, 112 aa, Artificial Sequence; identical to SEQ ID NO: 1549
  Description of Artificial Sequence: Synthetic polypeptide

SEQ ID NO: 1661 - protein, 107 aa, Artificial Sequence
  Description of Artificial Sequence: Synthetic polypeptide
DIQMTQSPSSLSASVGDRVTITCSGDKLGHTYTSWYQQKPGKAPKLLIYGKNIRPSGVPSRFSGSGSGTDFTLTISSLQPEDFATYYCQQNLAPPYTFGQGTKVEIK

SEQ ID NO: 1662 - protein, 107 aa, Artificial Sequence
  Description of Artificial Sequence: Synthetic polypeptide
DIQMTQSPSSLSASVGDRVTITCRASQSISNNLNWYQQKPGKAPKLLIYTASNLQNGVPSRFSGSGSGTDFTLTISSLQPEDFATYYCQQSNSWPYTFGQGTKVEIK

SEQ ID NO: 1663 - protein, 112 aa, Artificial Sequence; identical to SEQ ID NO: 1549
  Description of Artificial Sequence: Synthetic polypeptide

SEQ ID NO: 1664 - protein, 107 aa, Artificial Sequence
  Description of Artificial Sequence: Synthetic polypeptide
DIQMTQSPSSLSASVGDRVTITCRASQTIERRLNWYQQKPGKAPKLLIYHDNKRPSGVPSRFSGSGSGTDFTLTISSLQPEDFATYYCQQGYTLPWTFGQGTKVEIK

SEQ ID NO: 1665 - protein, 110 aa, Artificial Sequence
  Description of Artificial Sequence: Synthetic polypeptide
EIVLTQSPATLSLSPGERATLSCRASQSVSSGYLAWYQQKPGQAPRLLIYSTSSRATGIPDRFSGSGSGTDFTLTISRLEPEDFAVYYCQQSASAHPGWTFGQGTKVEIK

SEQ ID NO: 1666 - protein, 107 aa, Artificial Sequence
  Description of Artificial Sequence: Synthetic polypeptide
DIQMTQSPSSLSASVGDRVTITCRASQSINTFLNWYQQKPGKAPKLLIYGASSLQSGVPSRFSGSGSGTDFTLTISSLQPEDFATYYCQQGYRAPWTFGQGTKVEIK

SEQ ID NO: 1667 - protein, 107 aa, Artificial Sequence
  Description of Artificial Sequence: Synthetic polypeptide
DIQMTQSPSSLSASVGDRVTITCRASQSVSSYLNWYQQKPGKAPKLLIYAATSLQSGVPSRFSGSGSGTDFTLTISSLQPEDFATYYCQQGYSTPWTFGQGTKVEIK

SEQ ID NO: 1668 - protein, 107 aa, Artificial Sequence
  Description of Artificial Sequence: Synthetic polypeptide
DIQMTQSPSSLSASVGDRVTITCRASQSIRTYLNWYQQKPGKAPKLLIYGASSLQSGVPSRFSGSGSGTDFTLTISSLQPEDFATYYCQQSYRVPRSFGQGTKVEIK

SEQ ID NO: 1669 - protein, 109 aa, Artificial Sequence
  Description of Artificial Sequence: Synthetic polypeptide
EIVLTQSPATLSLSPGERATLSCRASQSVSSGYLAWYQQKPGQAPRLLIYDASSRATGIPDRFSGSGSGTDFTLTISRLEPEDFAVYYCQHFGGSPLLTFGQGTKVEIK

SEQ ID NO: 1670 - protein, 106 aa, Artificial Sequence
  Description of Artificial Sequence: Synthetic polypeptide
DIQMTQSPSSLSASVGDRVTITCRASQHIGKYLNWYQQKPGKAPKLLIYGASSLQSGVPSRFSGSGSGTDFTLTISSLQPEDFATYYCQQTYSPVTFGQGTKVEIK

SEQ ID NO: 1671 - protein, 107 aa, Artificial Sequence
  Description of Artificial Sequence: Synthetic polypeptide
DIQMTQSPSSLSASVGDRVTITCRASQSIGGYLNWYQQKPGKAPKLLIYAVSSLQSGVPSRFSGSGSGTDFTLTISSLQPEDFATYYCQQGFYTPWTFGQGTKVEIK

SEQ ID NO: 1672 - protein, 107 aa, Artificial Sequence; identical to SEQ ID NO: 1666
  Description of Artificial Sequence: Synthetic polypeptide

SEQ ID NO: 1673 - protein, 107 aa, Artificial Sequence
  Description of Artificial Sequence: Synthetic polypeptide
DIQMTQSPSSLSASVGDRVTITCRASQNIGKYLNWYQQKPGKAPKLLIYAASSLQSGVPSRFSGSGSGTDFTLTISSLQPEDFATYYCHQSYGIPWTFGQGTKVEIK

SEQ ID NO: 1674 - protein, 107 aa, Artificial Sequence
  Description of Artificial Sequence: Synthetic polypeptide
DIQMTQSPSSLSASVGDRVTITCRASQNIRNYLNWYQQKPGKAPKLLIYGASSLQSGVPSRFSGSGSGTDFTLTISSLQPEDFATYYCQQSYRSFFTFGQGTKVEIK

SEQ ID NO: 1675 - protein, 107 aa, Artificial Sequence
  Description of Artificial Sequence: Synthetic polypeptide
DIQMTQSPSSLSASVGDRVTITCRASQSIKNYLNWYQQKPGKAPKLLIYTASSLQSGVPSRFSGSGSGTDFTLTISSLQPEDFATYYCQQSYGNVWTFGQGTKVEIK

SEQ ID NO: 1676 - protein, 107 aa, Artificial Sequence; identical to SEQ ID NO: 1666
  Description of Artificial Sequence: Synthetic polypeptide

SEQ ID NO: 1677 - protein, 107 aa, Artificial Sequence
  Description of Artificial Sequence: Synthetic polypeptide
DIQMTQSPSSLSASVGDRVTITCRASQSITRYLNWYQQKPGKAPKLLIYTTSSLQSGVPSRFSGSGSGTDFTLTISSLQPEDFATYYCLQAYSTPWTFGQGTKVEIK

SEQ ID NO: 1678 - protein, 107 aa, Artificial Sequence
  Description of Artificial Sequence: Synthetic polypeptide
DIQMTQSPSSLSASVGDRVTITCRASEKISTYLNWYQQKPGKAPKLLIYAASSLQSGVPSRFSGSGSGTDFTLTISSLQPEDFATYYCQQSHQTPWTFGQGTKVEIK

SEQ ID NO: 1679 - protein, 108 aa, Artificial Sequence
  Description of Artificial Sequence: Synthetic polypeptide
EIVLTQSPATLSLSPGERATLSCRASQSVNSNHLAWYQQKPGQAPRLLIYSTSSRATGIPDRFSGSGSGTDFTLTISRLEPEDFAVYYCQQSGSSSLTFGQGTKVEIK

SEQ ID NO: 1680 - protein, 108 aa, Artificial Sequence
  Description of Artificial Sequence: Synthetic polypeptide
DIQMTQSPSSLSASVGDRVTITCRASQSISNYLNWYQQKPGKAPKLLIYGATSLQSGVPSRFSGSGSGTDFTLTISSLQPEDFATYYCQQSYIMSQWTFGQGTKVEIK

SEQ ID NO: 1681 - protein, 107 aa, Artificial Sequence
  Description of Artificial Sequence: Synthetic polypeptide
DIQMTQSPSSLSASVGDRVTITCRASQSITRYLNWYQQKPGKAPKLLIYGASSLQSGVPSRFSGSGSGTDFTLTISSLQPEDFATYYCQQGFRAPRTFGQGTKVEIK

SEQ ID NO: 1682 - protein, 107 aa, Artificial Sequence
  Description of Artificial Sequence: Synthetic polypeptide
DIQMTQSPSSLSASVGDRVTITCRASQSVGSYLNWYQQKPGKAPKLLIYSASSLQSGVPSRFSGSGSGTDFTLTISSLQPEDFATYYCQQSHATPWTFGQGTKVEIK

SEQ ID NO: 1683 - protein, 110 aa, Artificial Sequence
  Description of Artificial Sequence: Synthetic polypeptide
EIVLTQSPATLSLSPGERATLSCRASHSVSNNYLAWYQQKPGQAPRLLIYGASSRATGIPDRFSGSGSGTDFTLTISRLEPEDFAVYYCQLFDRSRPGYTFGQGTKVEIK

SEQ ID NO: 1684 - protein, 107 aa, Artificial Sequence; identical to SEQ ID NO: 1666
  Description of Artificial Sequence: Synthetic polypeptide

SEQ ID NO: 1685 - protein, 109 aa, Artificial Sequence
  Description of Artificial Sequence: Synthetic polypeptide
EIVLTQSPATLSLSPGERATLSCRASQSVSGTYLAWYQQKPGQAPRLLIYGASSRATGIPDRFSGSGSGTDFTLTISRLEPEDFAVYYCQQYKRSSGFTFGQGTKVEIK

SEQ ID NO: 1686 - protein, 373 aa, Artificial Sequence
  Description of Artificial Sequence: Synthetic polypeptide
MKHLWFFLLLVAAPRWVLSEVQLVESGGGLVQAGGSLRLSCAASGRTFSNYAMGWFRQAPGKEREFVAAITWSGTRTDYADSVKGRFTISADNAKNTVYLQMNSLKPEDTAVYYCAAAAWTIYEYDYWGQGTQVTVSSGGGGSEPKSSDKTHTCPPCPAPELLGGPSVFLFPPKPKDTLMISRTPEVTCVVVDVSHEDPEVKFNWYVDGVEVHNAKTKPREEQYNSTYRVVSVLTVLHQDWLNGKEYKCKVSNKALPAPIEKTISKAKGQPREPQVYTLPPSREEMTKNQVSLTCLVKGFYPSDIAVEWESNGQPENNYKTTPPVLDSDGSFFLYSLTVDKSRWQQGNVFSCSVMHEALHNHYTQKSLSLSPG

SEQ ID NO: 1687 - protein, 373 aa, Artificial Sequence
  Description of Artificial Sequence: Synthetic polypeptide
MKHLWFFLLLVAAPRWVLSEVQLVESGGGLVQAGGSLRLSCAASGRTFDIYAMGWFRQAPGKEREWVSTISWSGGRTYYADSVKGRFTISADNAKNTVYLQMNSLKPEDTAVYYCAARPVYRTYGSWGQGTQVTVSSGGGGSEPKSSDKTHTCPPCPAPELLGGPSVFLFPPKPKDTLMISRTPEVTCVVVDVSHEDPEVKFNWYVDGVEVHNAKTKPREEQYNSTYRVVSVLTVLHQDWLNGKEYKCKVSNKALPAPIEKTISKAKGQPREPQVYTLPPSREEMTKNQVSLTCLVKGFYPSDIAVEWESNGQPENNYKTTPPVLDSDGSFFLYSKLTVDKSRWQQGNVFSCSVMHEALHNHYTQKSLSLSPG

SEQ ID NO: 1688 - protein, 374 aa, Artificial Sequence
  Description of Artificial Sequence: Synthetic polypeptide
MKHLWFFLLLVAAPRWVLSEVQLVESGGGLVQAGGSLRLSCAASGFTFSSYAMGWFRQAPGKEREFVAAITWSGTRTDYADSVKGRFTISADNAKNTVYLQMNSLKPEDTAVYYCAAAAWRYSEYDYWGQGTQVTVSSGGGGSEPKSSDKTHTCPPCPAPELLGGPSVFLFPPKPKDTLMISRTPEVTCVVVDVSHEDPEVKFNWYVDGVEVHNAKTKPREEQYNSTYRVVSVLTVLHQDWLNGKEYKCKVSNKALPAPIEKTISKAKGQPREPQVYTLPPSREEMTKNQVSLTCLVKGFYPSDIAVEWESNGQPENNYKTTPPVLDSDGSFFLYSKLTVDKSRWQQGNVFSCSVMHEALHNHYTQKSLSLSPG

SEQ ID NO: 1689 - protein, 372 aa, Artificial Sequence
  Description of Artificial Sequence: Synthetic polypeptide
MKHLWFFLLLVAAPRWVLSEVQLVESGGGLVQAGGSLRLSCAASGSTFDTYVMGWFRQAPGKERELVSTISSDGDSTYYADSVKGRFTISADNAKNTVYLQMNSLKPEDTAVYYCAAGTRRGRNYWGQGTQVTVSSGGGGSEPKSSDKTHTCPPCPAPELLGGPSVFLFPPKPKDTLMISRTPEVTCVVVDVSHEDPEVKFNWYVDGVEVHNAKTKPREEQYNSTYRVVSVLTVLHQDWLNGKEYKCKVSNKALPAPIEKTISKAKGQPREPQVYTLPPSREEMTKNQVSLTCLVKGFYPSDIAVEWESNGQPENNYKTTPPVLDSDGSFFLYSKLTVDKSRWQQGNVFSCSVMHEALHNHYTQKSLSLSPG

SEQ ID NO: 1690 - protein, 373 aa, Artificial Sequence
  Description of Artificial Sequence: Synthetic polypeptide
MKHLWFFLLLVAAPRWVLSEVQLVESGGGLVQAGGSLRLSCAASGRTFSIYAMGWFRQAPGKEREWVATISSSGDRTYYADSVKGRFTISADNAKNTVYLQMNSLKPEDTAVYYCAARRYGRRYDYWGQGTQVTVSSGGGGSEPKSSDKTHTCPPCPAPELLGGPSVFLFPPKPKDTLMISRTPEVTCVVVDVSHEDPEVKFNWYVDGVEVHNAKTKPREEQYNSTYRVVSVLTVLHQDWLNGKEYKCKVSNKALPAPIEKTISKAKGQPREPQVYTLPPSREEMTKNQVSLTCLVKGFYPSDIAVEWESNGQPENNYKTTPPVLDSDGSFFLYSKLTVDKSRWQQGNVFSCSVMHEALHNHYTQKSLSLSPG

SEQ ID NO: 1691 - protein, 373 aa, Artificial Sequence
  Description of Artificial Sequence: Synthetic polypeptide
MKHLWFFLLLVAAPRWVLSEVQLVESGGGLVQAGGSLRLSCAASGGTFRSYVMGWFRQAPGKEREWVATINSSGSRTYYADSVKGRFTISADNAKNTVYLQMNSLKPEDTAVYYCAARPNYRDYEYWGQGTQVTVSSGGGGSEPKSSDKTHTCPPCPAPELLGGPSVFLFPPKPKDTLMISRTPEVTCVVVDVSHEDPEVKFNWYVDGVEVHNAKTKPREEQYNSTYRVVSVLTVLHQDWLNGKEYKCKVSNKALPAPIEKTISKAKGQPREPQVYTLPPSREEMTKNQVSLTCLVKGFYPSDIAVEWESNGQPENNYKTTPPVLDSDGSFFLYSKLTVDKSRWQQGNVFSCSVMHEALHNHYTQKSLSLSPG

SEQ ID NO: 1692 - protein, 374 aa, Artificial Sequence
  Description of Artificial Sequence: Synthetic polypeptide
MKHLWFFLLLVAAPRWVLSEVQLVESGGGLVQAGGSLRLSCAASGSIFSNYAMGWFRQAPGKEREFVATISRGGTRTNYADSVKGRFTISADNAKNTVYLQMNSLKPEDTAVYYCAAAAWTIYAYNYWGQGTQVTVSSGGGGSEPKSSDKTHTCPPCPAPELLGGPSVFLFPPKPKDTLMISRTPEVTCVVVDVSHEDPEVKFNWYVDGVEVHNAKTKPREEQYNSTYRVVSVLTVLHQDWLNGKEYKCKVSNKALPAPIEKTISKAKGQPREPQVYTLPPSREEMTKNQVSLTCLVKGFYPSDIAVEWESNGQPENNYKTTPPVLDSDGSFFLYSKLTVDKSRWQQGNVFSCSVMHEALHNHYTQKSLSLSPG

SEQ ID NO: 1693 - protein, 375 aa, Artificial Sequence
  Description of Artificial Sequence: Synthetic polypeptide
MKHLWFFLLLVAAPRWVLSEVQLVESGGGLVQAGGSLRLSCAASGRTLDDYVMGWFRQAPGKEREGVATISGGGDTTYYADSVKGRFTISADNAKNTVYLQMNSLKPEDTAVYYCAAVPWRWTTRRDYWGQGTQVTVSSGGGGSEPKSSDKTHTCPPCPAPELLGGPSVFLFPPKPKDTLMISRTPEVTCVVVDVSHEDPEVKFNWYVDGVEVHNAKTKPREEQYNSTYRVVSVLTVLHQDWLNGKEYKCKVSNKALPAPIEKTISKAKGQPREPQVYTLPPSREEMTKNQVSLTCLVKGFYPSDIAVEWESNGQPENNYKTTPPVLDSDGSFFLYSKLTVDKSRWQQGNVFSCSVMHEALHNHYTQKSLSLSPG

SEQ ID NO: 1694 - protein, 374 aa, Artificial Sequence
  Description of Artificial Sequence: Synthetic polypeptide
MKHLWFFLLLVAAPRWVLSEVQLVESGGGLVQAGGSLRLSCAASGFTFDNYAMGWFRQAPGKEREFVSSITWSGGRTSYADSVKGRFTISADNAKNTVYLQMNSLKPEDTAVYYCAANAWTIYRYDYWGQGTQVTVSSGGGGSEPKSSDKTHTCPPCPAPELLGGPSVFLFPPKPKDTLMISRTPEVTCVVVDVSHEDPEVKFNWYVDGVEVHNAKTKPREEQYNSTYRVVSVLTVLHQDWLNGKEYKCKVSNKALPAPIEKTISKAKGQPREPQVYTLPPSREEMTKNQVSLTCLVKGFYPSDIAVEWESNGQPENNYKTTPPVLDSDGSFFLYSKLTVDKSRWQQGNVFSCSVMHEALHNHYTQKSLSLSPG

SEQ ID NO: 1695 - protein, 379 aa, Artificial Sequence
  Description of Artificial Sequence: Synthetic polypeptide
MKHLWFFLLLVAAPRWVLSEVQLVESGGGLVQAGGSLRLSCAASGRTFSNYGMGWFRQAPGKEREFVSGISGSGGRTSYADSVKGRFTISADNAKNTVYLQMNSLKPEDTAVYYCAANLWYPVDRLNTGFNYWGQGTQVTVSSGGGGSEPKSSDKTHTCPPCPAPELLGGPSVFLFPPKPKDTLMISRTPEVTCVVVDVSHEDPEVKFNWYVDGVEVHNAKTKPREEQYNSTYRVVSVLTVLHQDWLNGKEYKCKVSNKALPAPIEKTISKAKGQPREPQVYTLPPSREEMTKNQVSLTCLVKGFYPSDIAVEWESNGQPENNYKTTPPVLDSDGSFFLYSKLTVDKSRWQQGNVFSCSVMHEALHNHYTQKSLSLSPG

SEQ ID NO: 1696 - protein, 377 aa, Artificial Sequence
  Description of Artificial Sequence: Synthetic polypeptide
MKHLWFFLLLVAAPRWVLSEVQLVESGGGLVQAGGSLRLSCAASGRTLSSYAMGWFRQAPGKEREFVASITWGGGRTYYADSVKGRFTISADNAKNTVYLQMNSLKPEDTAVYYCATRLWGTWTAGDYDYWGQGTQVTVSSGGGGSEPKSSDKTHTCPPCPAPELLGGPSVFLFPPKPKDTLMISRTPEVTCVVVDVSHEDPEVKFNWYVDGVEVHNAKTKPREEQYNSTYRVVSVLTVLHQDWLNGKEYKCKVSNKALPAPIEKTISKAKGQPREPQVYTLPPSREEMTKNQVSLTCLVKGFYPSDIAVEWESNGQPENNYKTTPPVLDSDGSFFLYSKLTVDKSRWQQGNVFSCSVMHEALHNHYTQKSLSLSPG

SEQ ID NO: 1697 - protein, 374 aa, Artificial Sequence
  Description of Artificial Sequence: Synthetic polypeptide
MKHLWFFLLLVAAPRWVLSEVQLVESGGGLVQAGGSLRLSCAASGSTFSSYAMGWFRQAPGKEREFVAAITWSGTRTNYADSVKGRFTISADNAKNTVYLQMNSLKPEDTAVYYCAAAAWTIYTYDSWGQGTQVTVSSGGGGSEPKSSDKTHTCPPCPAPELLGGPSVFLFPPKPKDTLMISRTPEVTCVVVDVSHEDPEVKFNWYVDGVEVHNAKTKPREEQYNSTYRVVSVLTVLHQDWLNGKEYKCKVSNKALPAPIEKTISKAKGQPREPQVYTLPPSREEMTKNQVSLTCLVKGFYPSDIAVEWESNGQPENNYKTTPPVLDSDGSFFLYSKLTVDKSRWQQGNVFSCSVMHEALHNHYTQKSLSLSPG

SEQ ID NO: 1698 - protein, 374 aa, Artificial Sequence
  Description of Artificial Sequence: Synthetic polypeptide
MKHLWFFLLLVAAPRWVLSEVQLVESGGGLVQAGGSLRLSCAASGFIFSNYAMGWFRQAPGKEREFVAAITWSGGRTYYADSVKGRFTISADNAKNTVYLQMNSLKPEDTAVYYCAAAAWTIYEYDYWGQGTQVTVSSGGGGSEPKSSDKTHTCPPCPAPELLGGPSVFLFPPKPKDTLMISRTPEVTCVVVDVSHEDPEVKFNWYVDGVEVHNAKTKPREEQYNSTYRVVSVLTVLHQDWLNGKEYKCKVSNKALPAPIEKTISKAKGQPREPQVYTLPPSREEMTKNQVSLTCLVKGFYPSDIAVEWESNGQPENNYKTTPPVLDSDGSFFLYSKLTVDKSRWQQGNVFSCSVMHEALHNHYTQKSLSLSPG

SEQ ID NO: 1699 - protein, 373 aa, Artificial Sequence
  Description of Artificial Sequence: Synthetic polypeptide
MKHLWFFLLLVAAPRWVLSEVQLVESGGGLVQAGGSLRLSCAASGFTFSDYVMGWFRQAPGKEREFVSAISWSGTNTNYADSVKGRFTISADNAKNTVYLQMNSLKPEDTAVYYCATRALRDGRGYWGQGTQVTVSSGGGGSEPKSSDKTHTCPPCPAPELLGGPSVFLFPPKPKDTLMISRTPEVTCVVVDVSHEDPEVKFNWYVDGVEVHNAKTKPREEQYNSTYRVVSVLTVLHQDWLNGKEYKCKVSNKALPAPIEKTISKAKGQPREPQVYTLPPSREEMTKNQVSLTCLVKGFYPSDIAVEWESNGQPENNYKTTPPVLDSDGSFFLYSKLTVDKSRWQQGNVFSCSVMHEALHNHYTQKSLSLSPG

SEQ ID NO: 1700 - protein, 374 aa, Artificial Sequence
  Description of Artificial Sequence: Synthetic polypeptide
MKHLWFFLLLVAAPRWVLSEVQLVESGGGLVQAGGSLRLSCAASGRTFDSYAMGWFRQAPGKEREGVATISGSGGRTYYADSVKGRFTISADNAKNTVYLQMNSLKPEDTAVYYCAAAAWTIYEFDSWGQGTQVTVTSGGGGSEPKSSDKTHTCPPCPAPELLGGPSVFLFPPKPKDTLMISRTPEVTCVVVDVSHEDPEVKFNWYVDGVEVHNAKTKPREEQYNSTYRVVSVLTVLHQDWLNGKEYKCKVSNKALPAPIEKTISKAKGQPREPQVYTLPPSREEMTKNQVSLTCLVKGFYPSDIAVEWESNGQPENNYKTTPPVLDSDGSFFLYSKLTVDKSRWQQGNVFSCSVMHEALHNHYTQKSLSLSPG

SEQ ID NO: 1701 - protein, 373 aa, Artificial Sequence
  Description of Artificial Sequence: Synthetic polypeptide
MKHLWFFLLLVAAPRWVLSEVQLVESGGGLVQAGGSLRLSCAASGSIFSIYAMGWFRQAPGKEREWVATISWGGNSTYYADSVKGRFTISADNAKNTVYLQMNSLKPEDTAVYYCAARPRFRTYGYWGQGTQVTVSSGGGGSEPKSSDKTHTCPPCPAPELLGGPSVFLFPPKPKDTLMISRTPEVTCVVVDVSHEDPEVKFNWYVDGVEVHNAKTKPREEQYNSTYRVVSVLTVLHQDWLNGKEYKCKVSNKALPAPIEKTISKAKGQPREPQVYTLPPSREEMTKNQVSLTCLVKGFYPSDIAVEWESNGQPENNYKTTPPVLDSDGSFFLYSKLTVDKSRWQQGNVFSCSVMHEALHNHYTQKSLSLSPG

SEQ ID NO: 1702 - protein, 372 aa, Artificial Sequence
  Description of Artificial Sequence: Synthetic polypeptide
MKHLWFFLLLVAAPRWVLSEVQLVESGGGLVQAGGSLRLSCAASGSTLSIYAMGWFRQAPGKERELVATISSGGGSTYYADSVKGRFTISADNAKNTVYLQMNSLKPEDTAVYYCAAGSVYGRNYWGQGTQVTVSSGGGGSEPKSSDKTHTCPPCPAPELLGGPSVFLFPPKPKDTLMISRTPEVTCVVVDVSHEDPEVKFNWYVDGVEVHNAKTKPREEQYNSTYRVVSVLTVLHQDWLNGKEYKCKVSNKALPAPIEKTISKAKGQPREPQVYTLPPSREEMTKNQVSLTCLVKGFYPSDIAVEWESNGQPENNYKTTPPVLDSDGSFFLYSKLTVDKSRWQQGNVFSCSVMHEALHNHYTQKSLSLSPG

SEQ ID NO: 1703 - protein, 377 aa, Artificial Sequence
  Description of Artificial Sequence: Synthetic polypeptide
MKHLWFFLLLVAAPRWVLSEVQLVESGGGLVQAGGSLRLSCAASGSTFSNYAMGWFRQAPGKEREFVSAINSSGSRTYYADSVKGRFTISADNAKNTVYLQMNSLKPEDTAVYYCAARLWGTWTAGDYDYWGQGTQVTVSSGGGGSEPKSSDKTHTCPPCPAPELLGGPSVFLFPPKPKDTLMISRTPEVTCVVVDVSHEDPEVKFNWYVDGVEVHNAKTKPREEQYNSTYRVVSVLTVLHQDWLNGKEYKCKVSNKALPAPIEKTISKAKGQPREPQVYTLPPSREEMTKNQVSLTCLVKGFYPSDIAVEWESNGQPENNYKTTPPVLDSDGSFFLYSKLTVDKSRWQQGNVFSCSVMHEALHNHYTQKSLSLSPG

SEQ ID NO: 1704 - protein, 374 aa, Artificial Sequence
  Description of Artificial Sequence: Synthetic polypeptide
MKHLWFFLLLVAAPRWVLSEVQLVESGGGLVQAGGSLRLSCAASGRTFSSYAMGWFRQAPGKEREFVATISGSFGRTYYADSVKGRFTISADNAKNTVYLQMNSLKPEDTAVYYCAAGAWTIYEYDYWGQGTQVTVSSGGGGSEPKSSDKTHTCPPCPAPELLGGPSVFLFPPKPKDTLMISRTPEVTCVVVDVSHEDPEVKFNWYVDGVEVHNAKTKPREEQYNSTYRVVSVLTVLHQDWLNGKEYKCKVSNKALPAPIEKTISKAKGQPREPQVYTLPPSREEMTKNQVSLTCLVKGFYPSDIAVEWESNGQPENNYKTTPPVLDSDGSFFLYSKLTVDKSRWQQGNVFSCSVMHEALHNHYTQKSLSLSPG

SEQ ID NO: 1705 - protein, 372 aa, Artificial Sequence
  Description of Artificial Sequence: Synthetic polypeptide
MKHLWFFLLLVAAPRWVLSEVQLVESGGGLVQAGGSLRLSCAASGSTFSIYAMGWFRQAPGKERELVASISWSGDTTNYADSVKGRFTISADNAKNTVYLQMNSLKPEDTAVYYCAAGSVYGRNSWGQGTQVTVTSGGGGSEPKSSDKTHTCPPCPAPELLGGPSVFLFPPKPKDTLMISRTPEVTCVVVDVSHEDPEVKFNWYVDGVEVHNAKTKPREEQYNSTYRVVSVLTVLHQDWLNGKEYKCKVSNKALPAPIEKTISKAKGQPREPQVYTLPPSREEMTKNQVSLTCLVKGFYPSDIAVEWESNGQPENNYKTTPPVLDSDGSFFLYSKLTVDKSRWQQGNVFSCSVMHEALHNHYTQKSLSLSPG

SEQ ID NO: 1706 - protein, 374 aa, Artificial Sequence
  Description of Artificial Sequence: Synthetic polypeptide
MKHLWFFLLLVAAPRWVLSEVQLVESGGGLVQAGGSLRLSCAASGSTFSNYAMGWFRQAPGKERELVSAITWSSSRTYYADSVKGRFTISADNAKNTVYLQMNSLKPEDTAVYYCAAAAWTIYNFEYWGQGTQVTVSSGGGGSEPKSSDKTHTCPPCPAPELLGGPSVFLFPPKPKDTLMISRTPEVTCVVVDVSHEDPEVKFNWYVDGVEVHNAKTKPREEQYNSTYRVVSVLTVLHQDWLNGKEYKCKVSNKALPAPIEKTISKAKGQPREPQVYTLPPSREEMTKNQVSLTCLVKGFYPSDIAVEWESNGQPENNYKTTPPVLDSDGSFFLYSKLTVDKSRWQQGNVFSCSVMHEALHNHYTQKSLSLSPG

SEQ ID NO: 1707 - protein, 377 aa, Artificial Sequence
  Description of Artificial Sequence: Synthetic polypeptide
MKHLWFFLLLVAAPRWVLSEVQLVESGGGLVQAGGSLRLSCAASGSILSSYTMGWFRQAPGKEREFVSTISRSSTRTYYADSVKGRFTISADNAKNTVYLQMNSLKPEDTAVYYCAARLWGTWTAGDYDYWGQGTQVTVSSGGGGSEPKSSDKTHTCPPCPAPELLGGPSVFLFPPKPKDTLMISRTPEVTCVVVDVSHEDPEVKFNWYVDGVEVHNAKTKPREEQYNSTYRVVSVLTVLHQDWLNGKEYKCKVSNKALPAPIEKTISKAKGQPREPQVYTLPPSREEMTKNQVSLTCLVKGFYPSDIAVEWESNGQPENNYKTTPPVLDSDGSFFLYSKLTVDKSRWQQGNVFSCSVMHEALHNHYTQKSLSLSPG

SEQ ID NO: 1708 - protein, 372 aa, Artificial Sequence
  Description of Artificial Sequence: Synthetic polypeptide
MKHLWFFLLLVAAPRWVLSEVQLVESGGGLVQAGGSLRLSCAASGSTFDIYAMGWFRQAPGKEREFVASISSGDTNTNYADSVKGRFTISADNAKNTVYLQMNSLKHEDTAVYYCAAGRYSGYNSWGQGTQVTVSSGGGGSEPKSSDKTHTCPPCPAPELLGGPSVFLFPPKPKDTLMISRTPEVTCVVVDVSHEDPEVKFNWYVDGVEVHNAKTKPREEQYNSTYRVVSVLTVLHQDWLNGKEYKCKVSNKALPAPIEKTISKAKGQPREPQVYTLPPSREEMTKNQVSLTCLVKGFYPSDIAVEWESNGQPENNYKTTPPVLDSDGSFFLYSKLTVDKSRWQQGNVFSCSVMHEALHNHYTQKSLSLSPG

SEQ ID NO: 1709 - protein, 372 aa, Artificial Sequence
  Description of Artificial Sequence: Synthetic polypeptide
MKHLWFFLLLVAAPRWVLSEVQLVESGGGLVQAGGSLRLSCAASGRTFDTYAMGWLRQAPGKEREFVSAISTGDGSTNYADSVKGRFTISADNAKNTVYLQMNSLKPEDTAVYYCAAARRSGRGSWGQGTQVTVTSGGGGSEPKSSDKTHTCPPCPAPELLGGPSVFLFPPKPKDTLMISRTPEVTCVVVDVSHEDPEVKFNWYVDGVEVHNAKTKPREEQYNSTYRVVSVLTVLHQDWLNGKEYKCKVSNKALPAPIEKTISKAKGQPREPQVYTLPPSREEMTKNQVSLTCLVKGFYPSDIAVEWESNGQPENNYKTTPPVLDSDGSFFLYSKLTVDKSRWQQGNVFSCSVMHEALHNHYTQKSLSLSPG

SEQ ID NO: 1710 - protein, 374 aa, Artificial Sequence
  Description of Artificial Sequence: Synthetic polypeptide
MKHLWFFLLLVAAPRWVLSEVQLVESGGGLVQAGGSLRLSCAASGFTFDNYAMGWFRQAPGKEREGVAAITWSGGRTYYADSVKGRFTISADNAKNTVYLQMNSLKPEDTAVYYCAAAAWTIYEYDSWGQGTQVTVTSGGGGSEPKSSDKTHTCPPCPAPELLGGPSVFLFPPKPKDTLMISRTPEVTCVVVDVSHEDPEVKFNWYVDGVEVHNAKTKPREEQYNSTYRVVSVLTVLHQDWLNGKEYKCKVSNKALPAPIEKTISKAKGQPREPQVYTLPPSREEMTKNQVSLTCLVKGFYPSDIAVEWESNGQPENNYKTTPPVLDSDGSFFLYSKLTVDKSRWQQGNVFSCSVMHEALHNHYTQKSLSLSPG

SEQ ID NO: 1711 - protein, 374 aa, Artificial Sequence
  Description of Artificial Sequence: Synthetic polypeptide
MKHLWFFLLLVAAPRWVLSEVQLVESGGGLVQAGGSLRLSCAASGFTFDNYAMGWFRQAPGKEREFVATITWSGTRTNYADSVKGRFTISADNAKNTVYLQMNSLKPEDTAVYYCAAAAWTIYDYDYWGQGTQVTVSSGGGGSEPKSSDKTHTCPPCPAPELLGGPSVFLFPPKPKDTLMISRTPEVTCVVVDVSHEDPEVKFNWYVDGVEVHNAKTKPREEQYNSTYRVVSVLTVLHQDWLNGKEYKCKVSNKALPAPIEKTISKAKGQPREPQVYTLPPSREEMTKNQVSLTCLVKGFYPSDIAVEWESNGQPENNYKTTPPVLDSDGSFFLYSKLTVDKSRWQQGNVFSCSVMHEALHNHYTQKSLSLSPG

SEQ ID NO: 1712 - protein, 374 aa, Artificial Sequence
  Description of Artificial Sequence: Synthetic polypeptide
MKHLWFFLLLVAAPRWVLSEVQLVESGGGLVQAGGSLRLSCAASGRTFSNNVMGWFRQAPGKEREFVAAISWGGASTNYADSVKGRFTISADNAKNTVYLQMNSLKPEDTAVYYCAAGPKTPDTRNYWGQGTQVTVSSGGGGSEPKSSDKTHTCPPCPAPELLGGPSVFLFPPKPKDTLMISRTPEVTCVVVDVSHEDPEVKFNWYVDGVEVHNAKTKPREEQYNSTYRVVSVLTVLHQDWLNGKEYKCKVSNKALPAPIEKTISKAKGQPREPQVYTLPPSREEMTKNQVSLTCLVKGFYPSDIAVEWESNGQPENNYKTTPPVLDSDGSFFLYSKLTVDKSRWQQGNVFSCSVMHEALHNHYTQKSLSLSPG

SEQ ID NO: 1713 - protein, 373 aa, Artificial Sequence
  Description of Artificial Sequence: Synthetic polypeptide
MKHLWFFLLLVAAPRWVLSEVQLVESGGGLVQAGGSLRLSCAASGFIFDSYAMGWFRQAPGKEREFVAAISWGGSNTNYADSVKGRFTISADNAKNTVYLQMNSLKPEDTAVYYCAAVRITDGRDYWGQGTQVTVSSGGGGSEPKSSDKTHTCPPCPAPELLGGPSVFLFPPKPKDTLMISRTPEVTCVVVDVSHEDPEVKFNWYVDGVEVHNAKTKPREEQYNSTYRVVSVLTVLHQDWLNGKEYKCKVSNKALPAPIEKTISKAKGQPREPQVYTLPPSREEMTKNQVSLTCLVKGFYPSDIAVEWESNGQPENNYKTTPPVLDSDGSFFLYSKLTVDKSRWQQGNVFSCSVMHEALHNHYTQKSLSLSPG

SEQ ID NO: 1714 - protein, 374 aa, Artificial Sequence
  Description of Artificial Sequence: Synthetic polypeptide
MKHLWFFLLLVAAPRWVLSEVQLVESGGGLVQAGGSLRLSCAASGRTFSNYAMGWFRQAPGKEREFVAAITWSGTRTDYADSVKGRFTISADNAKNTVYLQMNSLKPEDTAVYYCAAAAWTIYEYDYWGQGTQVTVSSGGGGSEPKSSDKTHTCPPCPAPELLGGPSVFLFPPKPKDTLMISRTPEVTCVVVDVSHEDPEVKFNWYVDGVEVHNAKTKPREEQYNSTYRVVSVLTVLHQDWLNGKEYKCKVSNKALPAPIEKTISKAKGQPREPQVYTLPPSREEMTKNQVSLTCLVKGFYPSDIAVEWESNGQPENNYKTTPPVLDSDGSFFLYSKLTVDKSRWQQGNVFSCSVMHEALHNHYTQKSLSLSPG

SEQ ID NO: 1715 - protein, 374 aa, Artificial Sequence; identical to SEQ ID NO: 1688
  Description of Artificial Sequence: Synthetic polypeptide

SEQ ID NO: 1716 - protein, 373 aa, Artificial Sequence
  Description of Artificial Sequence: Synthetic polypeptide
MKHLWFFLLLVAAPRWVLSEVQLVESGGGLVQAGGSLRLSCAASGFTFSIYAMGWFRQAPGKEREWVSTISWSGGNTYYADSVKGRFTISADNAKNTVYLQMNSLKPEDTAVYYCATRPRFRRYDSWGQGTQVTVSSGGGGSEPKSSDKTHTCPPCPAPELLGGPSVFLFPPKPKDTLMISRTPEVTCVVVDVSHEDPEVKFNWYVDGVEVHNAKTKPREEQYNSTYRVVSVLTVLHQDWLNGKEYKCKVSNKALPAPIEKTISKAKGQPREPQVYTLPPSREEMTKNQVSLTCLVKGFYPSDIAVEWESNGQPENNYKTTPPVLDSDGSFFLYSKLTVDKSRWQQGNVFSCSVMHEALHNHYTQKSLSLSPG

SEQ ID NO: 1717 - protein, 378 aa, Artificial Sequence
  Description of Artificial Sequence: Synthetic polypeptide
MKHLWFFLLLVAAPRWVLSEVQLVESGGGLVQAGGSLRLSCAASGSTFDSYAMGWFRQAPGKEREGVAAITTSGSSTYYADSVKGRFTISADNAKNTVYLQMNSLKPEDTAVYYCAARGGVRSGSPGTYNYWGQGTQVTVSSGGGGSEPKSSDKTHTCPPCPAPELLGGPSVFLFPPKPKDTLMISRTPEVTCVVVDVSHEDPEVKFNWYVDGVEVHNAKTKPREEQYNSTYRVVSVLTVLHQDWLNGKEYKCKVSNKALPAPIEKTISKAKGQPREPQVYTLPPSREEMTKNQVSLTCLVKGFYPSDIAVEWESNGQPENNYKTTPPVLDSDGSFFLYSKLTVDKSRWQQGNVFSCSVMHEALHNHYTQKSLSLSPG

SEQ ID NO: 1718 - protein, 374 aa, Artificial Sequence
  Description of Artificial Sequence: Synthetic polypeptide
MKHLWFFLLLVAAPRWVLSEVQLVESGGGLVQAGGSLRLSCAASGFIFSTYAMGWFRQAPGKERELVSAITRSGITTYYADSVKGRFTISADNAKNTVYLQMNSLKPEDTAVYYCAAAAWTIYEYDYWGQGTQVTVSSGGGGSEPKSSDKTHTCPPCPAPELLGGPSVFLFPPKPKDTLMISRTPEVTCVVVDVSHEDPEVKFNWYVDGVEVHNAKTKPREEQYNSTYRVVSVLTVLHQDWLNGKEYKCKVSNKALPAPIEKTISKAKGQPREPQVYTLPPSREEMTKNQVSLTCLVKGFYPSDIAVEWESNGQPENNYKTTPPVLDSDGSFFLYSKLTVDKSRWQQGNVFSCSVMHEALHNHYTQKSLSLSPG

SEQ ID NO: 1719 - protein, 377 aa, Artificial Sequence
  Description of Artificial Sequence: Synthetic polypeptide
MKHLWFFLLLVAAPRWVLSEVQLVESGGGLVQAGGSLRLSCAASGFTFRNYAMGWFRQAPGKEREFVSSISSSSSRTSYADSVKGRFTISADNAKNTVYLQMNSLKPEDTAVYYCAARLWGTWTAGDYDYWGQGTQVTVSSGGGGSEPKSSDKTHTCPPCPAPELLGGPSVFLFPPKPKDTLMISRTPEVTCVVVDVSHEDPEVKFNWYVDGVEVHNAKTKPREEQYNSTYRVVSVLTVLHQDWLNGKEYKCKVSNKALPAPIEKTISKAKGQPREPQVYTLPPSREEMTKNQVSLTCLVKGFYPSDIAVEWESNGQPENNYKTTPPVLDSDGSFFLYSKLTVDKSRWQQGNVFSCSVMHEALHNHYTQKSLSLSPG

SEQ ID NO: 1720 - protein, 373 aa, Artificial Sequence
  Description of Artificial Sequence: Synthetic polypeptide
MKHLWFFLLLVAAPRWVLSEVQLVESGGGLVQAGGSLRLSCAASGRIFSIYTMGWFRQAPGKEREWVATINSSGSRTYYADSVKGRFTISADNAKNTVYLQMNSLKPEDTAVYYCAARPSYNRYDSWGQGTQVTVSSGGGGSEPKSSDKTHTCPPCPAPELLGGPSVFLFPPKPKDTLMISRTPEVTCVVVDVSHEDPEVKFNWYVDGVEVHNAKTKPREEQYNSTYRVVSVLTVLHQDWLNGKEYKCKVSNKALPAPIEKTISKAKGQPREPQVYTLPPSREEMTKNQVSLTCLVKGFYPSDIAVEWESNGQPENNYKTTPPVLDSDGSFFLYSKLTVDKSRWQQGNVFSCSVMHEALHNHYTQKSLSLSPG

SEQ ID NO: 1721 - protein, 374 aa, Artificial Sequence
  Description of Artificial Sequence: Synthetic polypeptide
MKHLWFFLLLVAAPRWVLSEVQLVESGGGLVQAGGSLRLSCAASGFTFSSYAMGWFRQAPGKEREFVASITWSGTSTNYADSVKGRFTISADNAKNTVYLQMNSLKPEDTAVYYCAAAAWTIYAYDYWGQGTQVTVSSGGGGSEPKSSDKTHTCPPCPAPELLGGPSVFLFPPKPKDTLMISRTPEVTCVVVDVSHEDPEVKFNWYVDGVEVHNAKTKPREEQYNSTYRVVSVLTVLHQDWLNGKEYKCKVSNKALPAPIEKTISKAKGQPREPQVYTLPPSREEMTKNQVSLTCLVKGFYPSDIAVEWESNGQPENNYKTTPPVLDSDGSFFLYSKLTVDKSRWQQGNVFSCSVMHEALHNHYTQKSLSLSPG

SEQ ID NO: 1722 - protein, 374 aa, Artificial Sequence
  Description of Artificial Sequence: Synthetic polypeptide
MKHLWFFLLLVAAPRWVLSEVQLVESGGGLVQAGGSLRLSCAASGRTFSNYAMGWFRQAPGKEREFVAGISWSGTRTYYADSVKGRFTISADNAKNTVYLQMNSLKPEDTAVYYCAAAAWTIYEYDYWGQGTQVTVSSGGGGSEPKSSDKTHTCPPCPAPELLGGPSVFLFPPKPKDTLMISRTPEVTCVVVDVSHEDPEVKFNWYVDGVEVHNAKTKPREEQYNSTYRVVSVLTVLHQDWLNGKEYKCKVSNKALPAPIEKTISKAKGQPREPQVYTLPPSREEMTKNQVSLTCLVKGFYPSDIAVEWESNGQPENNYKTTPPVLDSDGSFFLYSKLTVDKSRWQQGNVFSCSVMHEALHNHYTQKSLSLSPG

SEQ ID NO: 1723 - protein, 371 aa, Artificial Sequence
  Description of Artificial Sequence: Synthetic polypeptide
MKHLWFFLLLVAAPRWVLSEVQLVESGGGLVQAGGSLRLSCAASGSTFSSYAMGWFRQAPGKEREFVSAISRNGASTSYADSVKGRFTISADNAKNTVYLQMNSLKPEDTAVYYCAAAGTRFDYWGQGTQVTVSSGGGGSEPKSSDKTHTCPPCPAPELLGGPSVFLFPPKPKDTLMISRTPEVTCVVVDVSHEDPEVKFNWYVDGVEVHNAKTKPREEQYNSTYRVVSVLTVLHQDWLNGKEYKCKVSNKALPAPIEKTISKAKGQPREPQVYTLPPSREEMTKNQVSLTCLVKGFYPSDIAVEWESNGQPENNYKTTPPVLDSDGSFFLYSKLTVDKSRWQQGNVFSCSVMHEALHNHYTQKSLSLSPG

SEQ ID NO: 1724 - protein, 375 aa, Artificial Sequence; identical to SEQ ID NO: 1693
  Description of Artificial Sequence: Synthetic polypeptide

SEQ ID NO: 1725 - protein, 374 aa, Artificial Sequence; identical to SEQ ID NO: 1711
  Description of Artificial Sequence: Synthetic polypeptide

SEQ ID NO: 1726 - protein, 374 aa, Artificial Sequence
  Description of Artificial Sequence: Synthetic polypeptide
MKHLWFFLLLVAAPRWVLSEVQLVESGGGLVQAGGSLRLSCAASGRTFSTNAMGWFRQAPGKEREWVTAITTSGGNTYYADSVKGRFTISADNAKNTVYLQMNSLKPEDTAVYYCAARDETYGTYDYWGQGTQVTVSSGGGGSEPKSSDKTHTCPPCPAPELLGGPSVFLFPPKPKDTLMISRTPEVTCVVVDVSHEDPEVKFNWYVDGVEVHNAKTKPREEQYNSTYRVVSVLTVLHQDWLNGKEYKCKVSNKALPAPIEKTISKAKGQPREPQVYTLPPSREEMTKNQVSLTCLVKGFYPSDIAVEWESNGQPENNYKTTPPVLDSDGSFFLYSKLTVDKSRWQQGNVFSCSVMHEALHNHYTQKSLSLSPG

SEQ ID NO: 1727 - protein, 377 aa, Artificial Sequence
  Description of Artificial Sequence: Synthetic polypeptide
MKHLWFFLLLVAAPRWVLSEVQLVESGGGLVQAGGSLRLSCAASGSTFSTYAMGWFRQAPGKEREFVATISTSSSRTYYADSVKGRFTISADNAKNTVYLQMNSLKPEDTAVYYCAARLWGTWTAGDYDYWGQGTQVTVSLGGGGSEPKSSDKTHTCPPCPAPELLGGPSVFLFPPKPKDTLMISRTPEVTCVVVDVSHEDPEVKFNWYVDGVEVHNAKTKPREEQYNSTYRVVSVLTVLHQDWLNGKEYKCKVSNKALPAPIEKTISKAKGQPREPQVYTLPPSREEMTKNQVSLTCLVKGFYPSDIAVEWESNGQPENNYKTTPPVLDSDGSFFLYSKLTVDKSRWQQGNVFSCSVMHEALHNHYTQKSLSLSPG

SEQ ID NO: 1728 - protein, 373 aa, Artificial Sequence
  Description of Artificial Sequence: Synthetic polypeptide
MKHLWFFLLLVAAPRWVLSEVQLVESGGGLVQAGGSLRLSCAASGRTFDSYAMGWFRQAPGKEREWVSAISWSGSSTYYADSVKGRFTISADNAKNTVYLQMNSLKPEDTAVYYCAARGGYGRYDSWGQGTQVTVTSGGGGSEPKSSDKTHTCPPCPAPELLGGPSVFLFPPKPKDTLMISRTPEVTCVVVDVSHEDPEVKFNWYVDGVEVHNAKTKPREEQYNSTYRVVSVLTVLHQDWLNGKEYKCKVSNKALPAPIEKTISKAKGQPREPQVYTLPPSREEMTKNQVSLTCLVKGFYPSDIAVEWESNGQPENNYKTTPPVLDSDGSFFLYSKLTVDKSRWQQGNVFSCSVMHEALHNHYTQKSLSLSPG

SEQ ID NO: 1729 - protein, 374 aa, Artificial Sequence
  Description of Artificial Sequence: Synthetic polypeptide
MKHLWFFLLLVAAPRWVLSEVQLVESGGGLVQAGGSLRLSCAASGFTFDNYAMGWFRQAPGKEREFVATITWSGTTTNYADSVKGRFTISADNAKNTVYLQMNSLKPEDTAVYYCAAAAWTIYDYDYWGQGTQVTVSSGGGGSEPKSSDKTHTCPPCPAPELLGGPSVFLFPPKPKDTLMISRTPEVTCVVVDVSHEDPEVKFNWYVDGVEVHNAKTKPREEQYNSTYRVVSVLTVLHQDWLNGKEYKCKVSNKALPAPIEKTISKAKGQPREPQVYTLPPSREEMTKNQVSLTCLVKGFYPSDIAVEWESNGQPENNYKTTPPVLDSDGSFFLYSKLTVDKSRWQQGNVFSCSVMHEALHNHYTQKSLSLSPG

SEQ ID NO: 1730 - protein, 374 aa, Artificial Sequence
  Description of Artificial Sequence: Synthetic polypeptide
MKHLWFFLLLVAAPRWVLSEVQLVESGGGLVQAGGSLRLSCAASGFTFSSYAMGWFRQAPGKEREFVASITWSGTRTDYADSVKGRFTISADNAKNTVYLQMNSLKPEDTAVYYCAAAAWTIYGYEYWGQGTQVTVSSGGGGSEPKSSDKTHTCPPCPAPELLGGPSVFLFPPKPKDTLMISRTPEVTCVVVDVSHEDPEVKFNWYVDGVEVHNAKTKPREEQYNSTYRVVSVLTVLHQDWLNGKEYKCKVSNKALPAPIEKTISKAKGQPREPQVYTLPPSREEMTKNQVSLTCLVKGFYPSDIAVEWESNGQPENNYKTTPPVLDSDGSFFLYSKLTVDKSRWQQGNVFSCSVMHEALHNHYTQKSLSLSPG

SEQ ID NO: 1731 - protein, 372 aa, Artificial Sequence
  Description of Artificial Sequence: Synthetic polypeptide
MKHLWFFLLLVAAPRWVLSEVQLVESGGGLVQAGGSLRLSCAASGSTFDIYAMGWFRQAPGKEREFVASISSGDTNTYYADSVKGRFTISADNAKNTVYLQMNSLKHEDTAVYYCAAGRYSGYNSWGQGTQVTVSSGGGGSEPKSSDKTHTCPPCPAPELLGGPSVFLFPPKPKDTLMISRTPEVTCVVVDVSHEDPEVKFNWYVDGVEVHNAKTKPREEQYNSTYRVVSVLTVLHQDWLNGKEYKCKVSNKALPAPIEKTISKAKGQPREPQVYTLPPSREEMTKNQVSLTCLVKGFYPSDIAVEWESNGQPENNYKTTPPVLDSDGSFFLYSKLTVDKSRWQQGNVFSCSVMHEALHNHYTQKSLSLSPG

SEQ ID NO: 1732 - protein, 382 aa, Artificial Sequence
  Description of Artificial Sequence: Synthetic polypeptide
MKHLWFFLLLVAAPRWVLSEVQLVESGGGLVQAGGSLRLSCAASGSTLSSYAMGWFRQAPGKERELVAAITGSGGRTYYADSVKGRFTISADNAKNTVYLQMNSLKPEDTAVYYCAANRRYSFPYWSFWYDDFDYWGQGTQVTVSSGGGGSEPKSSDKTHTCPPCPAPELLGGPSVFLFPPKPKDTLMISRTPEVTCVVVDVSHEDPEVKFNWYVDGVEVHNAKTKPREEQYNSTYRVVSVLTVLHQDWLNGKEYKCKVSNKALPAPIEKTISKAKGQPREPQVYTLPPSREEMTKNQVSLTCLVKGFYPSDIAVEWESNGQPENNYKTTPPVLDSDGSFFLYSKLTVDKSRWQQGNVFSCSVMHEALHNHYTQKSLSLSPG

SEQ ID NO: 1733 - protein, 373 aa, Artificial Sequence
  Description of Artificial Sequence: Synthetic polypeptide
MKHLWFFLLLVAAPRWVLSEVQLVESGGGLVQAGGSLRLSCAASGFAFSSYWMGWFRQAPGKERELVAARNSGGNTNYADSVKGRFTISADNAKNTVYLQMNSLKPEDTAVYYCAADVWYGSTWRNWGQGTQVTVSSGGGGSEPKSSDKTHTCPPCPAPELLGGPSVFLFPPKPKDTLMISRTPEVTCVVVDVSHEDPEVKFNWYVDGVEVHNAKTKPREEQYNSTYRVVSVLTVLHQDWLNGKEYKCKVSNKALPAPIEKTISKAKGQPREPQVYTLPPSREEMTKNQVSLTCLVKGFYPSDIAVEWESNGQPENNYKTTPPVLDSDGSFFLYSKLTVDKSRWQQGNVFSCSVMHEALHNHYTQKSLSLSPG

SEQ ID NO: 1734 - protein, 371 aa, Artificial Sequence
  Description of Artificial Sequence: Synthetic polypeptide
MKHLWFFLLLVAAPRWVLSEVQLVESGGGLVQAGGSLRLSCAASGRTFGDYIMGWFRQAPGKERELVATISGGGSTNYADSVKGRFTISADNAKNTVYLQMNSLKPEDTAVYYCAAVFSRGPLTWGQGTQVTVSSGGGGSEPKSSDKTHTCPPCPAPELLGGPSVFLFPPKPKDTLMISRTPEVTCVVVDVSHEDPEVKFNWYVDGVEVHNAKTKPREEQYNSTYRVVSVLTVLHQDWLNGKEYKCKVSNKALPAPIEKTISKAKGQPREPQVYTLPPSREEMTKNQVSLTCLVKGFYPSDIAVEWESNGQPENNYKTTPPVLDSDGSFFLYSKLTVDKSRWQQGNVFSCSVMHEALHNHYTQKSLSLSPG

SEQ ID NO: 1735 - protein, 371 aa, Artificial Sequence
  Description of Artificial Sequence: Synthetic polypeptide
MKHLWFFLLLVAAPRWVLSEVQLVESGGGLVQAGGSLRLSCAASGNIFSRYIMGWFRQAPGKEREWVAGISNGGTTKYADSVKGRFTISADNAKNTVYLQMNSLKPEDTAVYYCAQGWKIRPTIWGQGTQVTVSSGGGGSEPKSSDKTHTCPPCPAPELLGGPSVFLFPPKPKDTLMISRTPEVTCVVVDVSHEDPEVKFNWYVDGVEVHNAKTKPREEQYNSTYRVVSVLTVLHQDWLNGKEYKCKVSNKALPAPIEKTISKAKGQPREPQVYTLPPSREEMTKNQVSLTCLVKGFYPSDIAVEWESNGQPENNYKTTPPVLDSDGSFFLYSKLTVDKSRWQQGNVFSCSVMHEALHNHYTQKSLSLSPG

SEQ ID NO: 1736 - protein, 373 aa, Artificial Sequence
  Description of Artificial Sequence: Synthetic polypeptide
MKHLWFFLLLVAAPRWVLSEVQLVESGGGLVQAGGSLRLSCAASGFTFSTHWMGWFRQAPGKERELVAARNSGGNTNYADSVKGRFTISADNAKNTVYLQMNSLKPEDTAVYYCAADVWYGSTWRNWGQGTQVTVSSGGGGSEPKSSDKTHTCPPCPAPELLGGPSVFLFPPKPKDTLMISRTPEVTCVVVDVSHEDPEVKFNWYVDGVEVHNAKTKPREEQYNSTYRVVSVLTVLHQDWLNGKEYKCKVSNKALPAPIEKTISKAKGQPREPQVYTLPPSREEMTKNQVSLTCLVKGFYPSDIAVEWESNGQPENNYKTTPPVLDSDGSFFLYSKLTVDKSRWQQGNVFSCSVMHEALHNHYTQKSLSLSPG

SEQ ID NO: 1737 - protein, 378 aa, Artificial Sequence
  Description of Artificial Sequence: Synthetic polypeptide
MKHLWFFLLLVAAPRWVLSEVQLVESGGGLVQAGGSLRLSCAASGGTFRNYGMGWFRQAPGKERELVAAISWSGVSTIYADSVKGRFTISADNAKNTVYLQMNSLKPEDTAVYYCASSPYGPLYRSTHYYDWGQGTQVTVSSGGGGSEPKSSDKTHTCPPCPAPELLGGPSVFLFPPKPKDTLMISRTPEVTCVVVDVSHEDPEVKFNWYVDGVEVHNAKTKPREEQYNSTYRVVSVLTVLHQDWLNGKEYKCKVSNKALPAPIEKTISKAKGQPREPQVYTLPPSREEMTKNQVSLTCLVKGFYPSDIAVEWESNGQPENNYKTTPPVLDSDGSFFLYSKLTVDKSRWQQGNVFSCSVMHEALHNHYTQKSLSLSPG

SEQ ID NO: 1738 - protein, 370 aa, Artificial Sequence
  Description of Artificial Sequence: Synthetic polypeptide
MKHLWFFLLLVAAPRWVLSEVQLVESGGGLVQAGGSLRLSCAASGRFSRINSMGWFRQAPGKERELVAHIFRSGITSYASYADSVKGRFTISADNAKNTVYLQMNSLKPEDTAVYYCAIGRGSWGQGTQVTVSSGGGGSEPKSSDKTHTCPPCPAPELLGGPSVFLFPPKPKDTLMISRTPEVTCVVVDVSHEDPEVKFNWYVDGVEVHNAKTKPREEQYNSTYRVVSVLTVLHQDWLNGKEYKCKVSNKALPAPIEKTISKAKGQPREPQVYTLPPSREEMTKNQVSLTCLVKGFYPSDIAVEWESNGQPENNYKTTPPVLDSDGSFFLYSKLTVDKSRWQQGNVFSCSVMHEALHNHYTQKSLSLSPG

SEQ ID NO: 1739 - protein, 371 aa, Artificial Sequence
  Description of Artificial Sequence: Synthetic polypeptide
MKHLWFFLLLVAAPRWVLSEVQLVESGGGLVQAGGSLRLSCAASGIPASIRTMGWFRQAPGKEREGISLITSDDGSTYYADSVKGRFTISADNAKNTVYLQMNSLKPEDTAVYYCAWTTNRGMDWGQGTQVTVSSGGGGSEPKSSDKTHTCPPCPAPELLGGPSVFLFPPKPKDTLMISRTPEVTCVVVDVSHEDPEVKFNWYVDGVEVHNAKTKPREEQYNSTYRVVSVLTVLHQDWLNGKEYKCKVSNKALPAPIEKTISKAKGQPREPQVYTLPPSREEMTKNQVSLTCLVKGFYPSDIAVEWESNGQPENNYKTTPPVLDSDGSFFLYSKLTVDKSRWQQGNVFSCSVMHEALHNHYTQKSLSLSPG

SEQ ID NO: 1740 - protein, 373 aa, Artificial Sequence
  Description of Artificial Sequence: Synthetic polypeptide
MKHLWFFLLLVAAPRWVLSEVQLVESGGGLVQAGGSLRLSCAASGFTMSSSWMGWFRQAPGKEREFVATLTSGGSTNYADSVKGRFTISADNAKNTVYLQMNSLKPEDTAVYYCAADVWYGSTWRNWGQGTQVTVSSGGGGSEPKSSDKTHTCPPCPAPELLGGPSVFLFPPKPKDTLMISRTPEVTCVVVDVSHEDPEVKFNWYVDGVEVHNAKTKPREEQYNSTYRVVSVLTVLHQDWLNGKEYKCKVSNKALPAPIEKTISKAKGQPREPQVYTLPPSREEMTKNQVSLTCLVKGFYPSDIAVEWESNGQPENNYKTTPPVLDSDGSFFLYSKLTVDKSRWQQGNVFSCSVMHEALHNHYTQKSLSLSPG

SEQ ID NO: 1741 - protein, 380 aa, Artificial Sequence
  Description of Artificial Sequence: Synthetic polypeptide
MKHLWFFLLLVAAPRWVLSEVQLVESGGGLVQAGGSLRLSCAASGPISGINRMGWFRQAPGKEREWVSTITFNGDHTYYADSVKGRFTISADNAKNTVYLQMNSLKPEDTAVYYCAARPYTRPGSMWVSSLYDWGQGTQVTVSSGGGGSEPKSSDKTHTCPPCPAPELLGGPSVFLFPPKPKDTLMISRTPEVTCVVVDVSHEDPEVKFNWYVDGVEVHNAKTKPREEQYNSTYRVVSVLTVLHQDWLNGKEYKCKVSNKALPAPIEKTISKAKGQPREPQVYTLPPSREEMTKNQVSLTCLVKGFYPSDIAVEWESNGQPENNYKTTPPVLDSDGSFFLYSKLTVDKSRWQQGNVFSCSVMHEALHNHYTQKSLSLSPG

SEQ ID NO: 1742 - protein, 373 aa, Artificial Sequence
  Description of Artificial Sequence: Synthetic polypeptide
MKHLWFFLLLVAAPRWVLSEVQLVESGGGLVQAGGSLRLSCAASVRTFSLSDMGWFRQAPGKEREFVGAINWLSESTYYADSVKGRFTISADNAKNTVYLQMNSLKPEDTAVYYCAAQGGVLSGWDWGQGTQVTVSSGGGGSEPKSSDKTHTCPPCPAPELLGGPSVFLFPPKPKDTLMISRTPEVTCVVVDVSHEDPEVKFNWYVDGVEVHNAKTKPREEQYNSTYRVVSVLTVLHQDWLNGKEYKCKVSNKALPAPIEKTISKAKGQPREPQVYTLPPSREEMTKNQVSLTCLVKGFYPSDIAVEWESNGQPENNYKTTPPVLDSDGSFFLYSKLTVDKSRWQQGNVFSCSVMHEALHNHYTQKSLSLSPG

SEQ ID NO: 1743 - protein, 371 aa, Artificial Sequence
  Description of Artificial Sequence: Synthetic polypeptide
MKHLWFFLLLVAAPRWVLSEVQLVESGGGLVQAGGSLRLSCAASGSITSIRSMGWFRQAPGKEREWVSSVYIFGGSTYYADSVKGRFTISADNAKNTVYLQMNSLKPEDTAVYYCANSNKPKFDWGQGTQVTVSSGGGGSEPKSSDKTHTCPPCPAPELLGGPSVFLFPPKPKDTLMISRTPEVTCVVVDVSHEDPEVKFNWYVDGVEVHNAKTKPREEQYNSTYRVVSVLTVLHQDWLNGKEYKCKVSNKALPAPIEKTISKAKGQPREPQVYTLPPSREEMTKNQVSLTCLVKGFYPSDIAVEWESNGQPENNYKTTPPVLDSDGSFFLYSKLTVDKSRWQQGNVFSCSVMHEALHNHYTQKSLSLSPG

SEQ ID NO: 1744 - protein, 371 aa, Artificial Sequence
  Description of Artificial Sequence: Synthetic polypeptide
MKHLWFFLLLVAAPRWVLSEVQLVESGGGLVQAGGSLRLSCAASGRTFGDYIMGWFRQAPGKERELVASVSGGGNSDYADSVKGRFTISADNAKNTVYLQMNSLKPEDTAVYYCAAVFSRGPLTWGQGTQVTVSSGGGGSEPKSSDKTHTCPPCPAPELLGGPSVFLFPPKPKDTLMISRTPEVTCVVVDVSHEDPEVKFNWYVDGVEVHNAKTKPREEQYNSTYRVVSVLTVLHQDWLNGKEYKCKVSNKALPAPIEKTISKAKGQPREPQVYTLPPSREEMTKNQVSLTCLVKGFYPSDIAVEWESNGQPENNYKTTPPVLDSDGSFFLYSKLTVDKSRWQQGNVFSCSVMHEALHNHYTQKSLSLSPG

SEQ ID NO: 1745 - protein, 367 aa, Artificial Sequence
  Description of Artificial Sequence: Synthetic polypeptide
MKHLWFFLLLVAAPRWVLSEVQLVESGGGLVQAGGSLRLSCAASGRTFSNYFMGWFRQAPGKERESVAAINWDSARTYYADSVKGRFTISADNAKNTVYLQMNSLKPEDTAVYYCASAGRWGQGTQVTVSSGGGGSEPKSSDKTHTCPPCPAPELLGGPSVFLFPPKPKDTLMISRTPEVTCVVVDVSHEDPEVKFNWYVDGVEVHNAKTKPREEQYNSTYRVVSVLTVLHQDWLNGKEYKCKVSNKALPAPIEKTISKAKGQPREPQVYTLPPSREEMTKNQVSLTCLVKGFYPSDIAVEWESNGQPENNYKTTPPVLDSDGSFFLYSKLTVDKSRWQQGNVFSCSVMHEALHNHYTQKSLSLSPG

SEQ ID NO: 1746 - protein, 376 aa, Artificial Sequence
  Description of Artificial Sequence: Synthetic polypeptide
MKHLWFFLLLVAAPRWVLSEVQLVESGGGLVQAGGSLRLSCAASGPTFSIYDMGWFRQAPGKEREFVAAITWNSGRTNYADSVKGRFTISADNAKNTVYLQMNSLKPEDTAVYYCAAGAWSSLRKTAASWGQGTQVTVSSGGGGSEPKSSDKTHTCPPCPAPELLGGPSVFLFPPKPKDTLMISRTPEVTCVVVDVSHEDPEVKFNWYVDGVEVHNAKTKPREEQYNSTYRVVSVLTVLHQDWLNGKEYKCKVSNKALPAPIEKTISKAKGQPREPQVYTLPPSREEMTKNQVSLTCLVKGFYPSDIAVEWESNGQPENNYKTTPPVLDSDGSFFLYSKLTVDKSRWQQGNVFSCSVMHEALHNHYTQKSLSLSPG

SEQ ID NO: 1747 - protein, 374 aa, Artificial Sequence
  Description of Artificial Sequence: Synthetic polypeptide
MKHLWFFLLLVAAPRWVLSEVQLVESGGGLVQAGGSLRLSCAASGFTFSGNWMGWFRQAPGKEREWVSGISSGGGRTYYADSVKGRFTISADNAKNTVYLQMNSLKPEDTAVYYCAADVWYGSTWRNWGQGTQVTVSSGGGGSEPKSSDKTHTCPPCPAPELLGGPSVFLFPPKPKDTLMISRTPEVTCVVVDVSHEDPEVKFNWYVDGVEVHNAKTKPREEQYNSTYRVVSVLTVLHQDWLNGKEYKCKVSNKALPAPIEKTISKAKGQPREPQVYTLPPSREEMTKNQVSLTCLVKGFYPSDIAVEWESNGQPENNYKTTPPVLDSDGSFFLYSKLTVDKSRWQQGNVFSCSVMHEALHNHYTQKSLSLSPG

SEQ ID NO: 1748 - protein, 368 aa, Artificial Sequence
  Description of Artificial Sequence: Synthetic polypeptide
MKHLWFFLLLVAAPRWVLSEVQLVESGGGLVQAGGSLRLSCAASGFPFSEYPMGWFRQAPGKEREFVAVVNWNGDSTYYADSVKGRFTISADNAKNTVYLQMNSLKPEDTAVYYCANFNRDWGQGTQVTVSSGGGGSEPKSSDKTHTCPPCPAPELLGGPSVFLFPPKPKDTLMISRTPEVTCVVVDVSHEDPEVKFNWYVDGVEVHNAKTKPREEQYNSTYRVVSVLTVLHQDWLNGKEYKCKVSNKALPAPIEKTISKAKGQPREPQVYTLPPSREEMTKNQVSLTCLVKGFYPSDIAVEWESNGQPENNYKTTPPVLDSDGSFFLYSKLTVDKSRWQQGNVFSCSVMHEALHNHYTQKSLSLSPG

SEQ ID NO: 1749 - protein, 369 aa, Artificial Sequence
  Description of Artificial Sequence: Synthetic polypeptide
MKHLWFFLLLVAAPRWVLSEVQLVESGGGLVQAGGSLRLSCAASGSIFNIGMGWFRQAPGKEREWVSSIYSNGHTYYADSVKGRFTISADNAKNTVYLQMNSLKPEDTAVYYCANSNKPKFDWGQGTQVTVSSGGGGSEPKSSDKTHTCPPCPAPELLGGPSVFLFPPKPKDTLMISRTPEVTCVVVDVSHEDPEVKFNWYVDGVEVHNAKTKPREEQYNSTYRVVSVLTVLHQDWLNGKEYKCKVSNKALPAPIEKTISKAKGQPREPQVYTLPPSREEMTKNQVSLTCLVKGFYPSDIAVEWESNGQPENNYKTTPPVLDSDGSFFLYSKLTVDKSRWQQGNVFSCSVMHEALHNHYTQKSLSLSPG

SEQ ID NO: 1750 - protein, 371 aa, Artificial Sequence
  Description of Artificial Sequence: Synthetic polypeptide
MKHLWFFLLLVAAPRWVLSEVQLVESGGGLVQAGGSLRLSCAASGRAFSLRTMGWFRQAPGKEREGISLITSDDGSTYYADSVKGRFTISADNAKNTVYLQMNSLKPEDTAVYYCAWTTNRGMDWGQGTQVTVSSGGGGSEPKSSDKTHTCPPCPAPELLGGPSVFLFPPKPKDTLMISRTPEVTCVVVDVSHEDPEVKFNWYVDGVEVHNAKTKPREEQYNSTYRVVSVLTVLHQDWLNGKEYKCKVSNKALPAPIEKTISKAKGQPREPQVYTLPPSREEMTKNQVSLTCLVKGFYPSDIAVEWESNGQPENNYKTTPPVLDSDGSFFLYSKLTVDKSRWQQGNVFSCSVMHEALHNHYTQKSLSLSPG

SEQ ID NO: 1751 - protein, 373 aa, Artificial Sequence
  Description of Artificial Sequence: Synthetic polypeptide
MKHLWFFLLLVAAPRWVLSEVQLVESGGGLVQAGGSLRLSCAASGRTFSSYAMMGWFRQAPGKEREFLAIITDGSKTLYADSVKGRFTISADNAKNTVYLQMNSLKPEDTAVYYCAAQFTLARHLVWGQGTQVTVSSGGGGSEPKSSDKTHTCPPCPAPELLGGPSVFLFPPKPKDTLMISRTPEVTCVVVDVSHEDPEVKFNWYVDGVEVHNAKTKPREEQYNSTYRVVSVLTVLHQDWLNGKEYKCKVSNKALPAPIEKTISKAKGQPREPQVYTLPPSREEMTKNQVSLTCLVKGFYPSDIAVEWESNGQPENNYKTTPPVLDSDGSFFLYSKLTVDKSRWQQGNVFSCSVMHEALHNHYTQKSLSLSPG

SEQ ID NO: 1752 - protein, 376 aa, Artificial Sequence
  Description of Artificial Sequence: Synthetic polypeptide
MKHLWFFLLLVAAPRWVLSEVQLVESGGGLVQAGGSLRLSCAASGPTFSIYDMGWFRQAPGKEREFVAVINWSRGSTFYADSVKGRFTISADNAKNTVYLQMNSLKPEDTAVYYCAAGVWSSLRHTAANWGQGTQVTVSSGGGGSEPKSSDKTHTCPPCPAPELLGGPSVFLFPPKPKDTLMISRTPEVTCVVVDVSHEDPEVKFNWYVDGVEVHNAKTKPREEQYNSTYRVVSVLTVLHQDWLNGKEYKCKVSNKALPAPIEKTISKAKGQPREPQVYTLPPSREEMTKNQVSLTCLVKGFYPSDIAVEWESNGQPENNYKTTPPVLDSDGSFFLYSKLTVDKSRWQQGNVFSCSVMHEALHNHYTQKSLSLSPG

SEQ ID NO: 1753 - protein, 373 aa, Artificial Sequence
  Description of Artificial Sequence: Synthetic polypeptide
MKHLWFFLLLVAAPRWVLSEVQLVESGGGLVQAGGSLRLSCAASGFTFSTSWMGWFRQAPGKERELVATINSGGGTNYADSVKGRFTISADNAKNTVYLQMNSLKPEDTAVYYCAADVWYGSTWRNWGQGTQVTVSSGGGGSEPKSSDKTHTCPPCPAPELLGGPSVFLFPPKPKDTLMISRTPEVTCVVVDVSHEDPEVKFNWYVDGVEVHNAKTKPREEQYNSTYRVVSVLTVLHQDWLNGKEYKCKVSNKALPAPIEKTISKAKGQPREPQVYTLPPSREEMTKNQVSLTCLVKGFYPSDIAVEWESNGQPENNYKTTPPVLDSDGSFFLYSKLTVDKSRWQQGNVFSCSVMHEALHNHYTQKSLSLSPG

SEQ ID NO: 1754 - protein, 374 aa, Artificial Sequence
  Description of Artificial Sequence: Synthetic polypeptide
MKHLWFFLLLVAAPRWVLSEVQLVESGGGLVQAGGSLRLSCAASGFTLSGNWMGWFRQAPGKEREFVASISSSGVSKHYADSVKGRFTISADNAKNTVYLQMNSLKPEDTAVYYCAADVWYGSTWRNWGRGTQVTVSSGGGGSEPKSSDKTHTCPPCPAPELLGGPSVFLFPPKPKDTLMISRTPEVTCVVVDVSHEDPEVKFNWYVDGVEVHNAKTKPREEQYNSTYRVVSVLTVLHQDWLNGKEYKCKVSNKALPAPIEKTISKAKGQPREPQVYTLPPSREEMTKNQVSLTCLVKGFYPSDIAVEWESNGQPENNYKTTPPVLDSDGSFFLYSKLTVDKSRWQQGNVFSCSVMHEALHNHYTQKSLSLSPG

SEQ ID NO: 1755 - protein, 371 aa, Artificial Sequence
  Description of Artificial Sequence: Synthetic polypeptide
MKHLWFFLLLVAAPRWVLSEVQLVESGGGLVQAGGSLRLSCAASGRAFRRYTMGWFRQAPGKEREFVAAIRWSGGTTFYADSVKGRFTISADNAKNTVYLQMNSLKPEDTAVYYCAAEWAAMKDWGQGTQVTVSSGGGGSEPKSSDKTHTCPPCPAPELLGGPSVFLFPPKPKDTLMISRTPEVTCVVVDVSHEDPEVKFNWYVDGVEVHNAKTKPREEQYNSTYRVVSVLTVLHQDWLNGKEYKCKVSNKALPAPIEKTISKAKGQPREPQVYTLPPSREEMTKNQVSLTCLVKGFYPSDIAVEWESNGQPENNYKTTPPVLDSDGSFFLYSKLTVDKSRWQQGNVFSCSVMHEALHNHYTQKSLSLSPG

SEQ ID NO: 1756 - protein, 371 aa, Artificial Sequence
  Description of Artificial Sequence: Synthetic polypeptide
MKHLWFFLLLVAAPRWVLSEVQLVESGGGLVQAGGSLRLSCAASGNIFSRYIMGWFRQAPGKEREWVAGISNGGTTKYADSVKGRFTISADNAKNTVYLQMNSLKPEDTAVYYCAQGWKIIPTDWGQGTQVTVSSGGGGSEPKSSDKTHTCPPCPAPELLGGPSVFLFPPKPKDTLMISRTPEVTCVVVDVSHEDPEVKFNWYVDGVEVHNAKTKPREEQYNSTYRVVSVLTVLHQDWLNGKEYKCKVSNKALPAPIEKTISKAKGQPREPQVYTLPPSREEMTKNQVSLTCLVKGFYPSDIAVEWESNGQPENNYKTTPPVLDSDGSFFLYSKLTVDKSRWQQGNVFSCSVMHEALHNHYTQKSLSLSPG

SEQ ID NO: 1757 - protein, 376 aa, Artificial Sequence
  Description of Artificial Sequence: Synthetic polypeptide
MKHLWFFLLLVAAPRWVLSEVQLVESGGGLVQAGGSLRLSCAASGPTFSIYDMGWFRQAPGKEREFVASTIWSRGDTYYADSVKGRFTISADNAKNTVYLQMNSLKPEDTAVYYCAAGVWSSLRHTAANWGQGTQVTVSSGGGGSEPKSSDKTHTCPPCPAPELLGGPSVFLFPPKPKDTLMISRTPEVTCVVVDVSHEDPEVKFNWYVDGVEVHNAKTKPREEQYNSTYRVVSVLTVLHQDWLNGKEYKCKVSNKALPAPIEKTISKAKGQPREPQVYTLPPSREEMTKNQVSLTCLVKGFYPSDIAVEWESNGQPENNYKTTPPVLDSDGSFFLYSKLTVDKSRWQQGNVFSCSVMHEALHNHYTQKSLSLSPG

SEQ ID NO: 1758 - protein, 370 aa, Artificial Sequence
  Description of Artificial Sequence: Synthetic polypeptide
MKHLWFFLLLVAAPRWVLSEVQLVESGGGLVQAGGSLRLSCAASGRTYYAMGWFRQAPGKEREFLAIITDGSKTLYADSVKGRFTISADNAKNTVYLQMNSLKPEDTAVYYCAAQFTLARHLVWGQGTQVTVSSGGGGSEPKSSDKTHTCPPCPAPELLGGPSVFLFPPKPKDTLMISRTPEVTCVVVDVSHEDPEVKFNWYVDGVEVHNAKTKPREEQYNSTYRVVSVLTVLHQDWLNGKEYKCKVSNKALPAPIEKTISKAKGQPREPQVYTLPPSREEMTKNQVSLTCLVKGFYPSDIAVEWESNGQPENNYKTTPPVLDSDGSFFLYSKLTVDKSRWQQGNVFSCSVMHEALHNHYTQKSLSLSPG

SEQ ID NO: 1759 - protein, 373 aa, Artificial Sequence
  Description of Artificial Sequence: Synthetic polypeptide
MKHLWFFLLLVAAPRWVLSEVQLVESGGGLVQAGGSLRLSCAASGFTFSTSWMGWFRQAPGKEREFVAGILSDGRELYADSVKGRFTISADNAKNTVYLQMNSLKPEDTAVYYCAADVWYGSTWRNWGQGTQVTVSSGGGGSEPKSSDKTHTCPPCPAPELLGGPSVFLFPPKPKDTLMISRTPEVTCVVVDVSHEDPEVKFNWYVDGVEVHNAKTKPREEQYNSTYRVVSVLTVLHQDWLNGKEYKCKVSNKALPAPIEKTISKAKGQPREPQVYTLPPSREEMTKNQVSLTCLVKGFYPSDIAVEWESNGQPENNYKTTPPVLDSDGSFFLYSKLTVDKSRWQQGNVFSCSVMHEALHNHYTQKSLSLSPG

SEQ ID NO: 1760 - protein, 373 aa, Artificial Sequence
  Description of Artificial Sequence: Synthetic polypeptide
MKHLWFFLLLVAAPRWVLSEVQLVESGGGLVQAGGSLRLSCAASGRTFESYRMGWFRQAPGKEREFVGGINWSGRTYYADSVKGRFTISADNAKNTVYLQMNSLKPEDTAVYYCAARRLYSGSYLDWGQGTQVTVSSGGGGSEPKSSDKTHTCPPCPAPELLGGPSVFLFPPKPKDTLMISRTPEVTCVVVDVSHEDPEVKFNWYVDGVEVHNAKTKPREEQYNSTYRVVSVLTVLHQDWLNGKEYKCKVSNKALPAPIEKTISKAKGQPREPQVYTLPPSREEMTKNQVSLTCLVKGFYPSDIAVEWESNGQPENNYKTTPPVLDSDGSFFLYSKLTVDKSRWQQGNVFSCSVMHEALHNHYTQKSLSLSPG

SEQ ID NO: 1761 - protein, 371 aa, Artificial Sequence
  Description of Artificial Sequence: Synthetic polypeptide
MKHLWFFLLLVAAPRWVLSEVQLVESGGGLVQAGGSLRLSCAASGSSLSFNAMGWFRQAPGKEREWVSSVYIFGGSTYYADSVKGRFTISADNAKNTVYLQMNSLKPEDTAVYYCANSNKPKFDWGQGTQVTVSSGGGGSEPKSSDKTHTCPPCPAPELLGGPSVFLFPPKPKDTLMISRTPEVTCVVVDVSHEDPEVKFNWYVDGVEVHNAKTKPREEQYNSTYRVVSVLTVLHQDWLNGKEYKCKVSNKALPAPIEKTISKAKGQPREPQVYTLPPSREEMTKNQVSLTCLVKGFYPSDIAVEWESNGQPENNYKTTPPVLDSDGSFFLYSKLTVDKSRWQQGNVFSCSVMHEALHNHYTQKSLSLSPG

SEQ ID NO: 1762 - protein, 371 aa, Artificial Sequence
  Description of Artificial Sequence: Synthetic polypeptide
MKHLWFFLLLVAAPRWVLSEVQLVESGGGLVQAGGSLRLSCAASGGTFSGRGMGWFRQAPGKEREWVSSVYIFGGSTYYADSVKGRFTISADNAKNTVYLQMNSLKPEDTAVYYCANSNKPKFDWGQGTQVTVSSGGGGSEPKSSDKTHTCPPCPAPELLGGPSVFLFPPKPKDTLMISRTPEVTCVVVDVSHEDPEVKFNWYVDGVEVHNAKTKPREEQYNSTYRVVSVLTVLHQDWLNGKEYKCKVSNKALPAPIEKTISKAKGQPREPQVYTLPPSREEMTKNQVSLTCLVKGFYPSDIAVEWESNGQPENNYKTTPPVLDSDGSFFLYSKLTVDKSRWQQGNVFSCSVMHEALHNHYTQKSLSLSPG

SEQ ID NO: 1763 - protein, 372 aa, Artificial Sequence
  Description of Artificial Sequence: Synthetic polypeptide
MKHLWFFLLLVAAPRWVLSEVQLVESGGGLVQAGGSLRLSCAASGPTFSWTMMGWFRQAPGKEREFLAIITDGSKTLYADSVKGRFTISADNAKNTVYLQMNSLKPEDTAVYYCAAQFTLARHLVWGQGTQVTVSSGGGGSEPKSSDKTHTCPPCPAPELLGGPSVFLFPPKPKDTLMISRTPEVTCVVVDVSHEDPEVKFNWYVDGVEVHNAKTKPREEQYNSTYRVVSVLTVLHQDWLNGKEYKCKVSNKALPAPIEKTISKAKGQPREPQVYTLPPSREEMTKNQVSLTCLVKGFYPSDIAVEWESNGQPENNYKTTPPVLDSDGSFFLYSKLTVDKSRWQQGNVFSCSVMHEALHNHYTQKSLSLSPG

SEQ ID NO: 1764 - protein, 371 aa, Artificial Sequence
  Description of Artificial Sequence: Synthetic polypeptide
MKHLWFFLLLVAAPRWVLSEVQLVESGGGLVQAGGSLRLSCAASGIIGTIRTMGWFRQAPGKEREGISLITSDDGSTYYADSVKGRFTISADNAKNTVYLQMNSLKPEDTAVYYCAWTTNRGMDWGQGTQVTVSSGGGGSEPKSSDKTHTCPPCPAPELLGGPSVFLFPPKPKDTLMISRTPEVTCVVVDVSHEDPEVKFNWYVDGVEVHNAKTKPREEQYNSTYRVVSVLTVLHQDWLNGKEYKCKVSNKALPAPIEKTISKAKGQPREPQVYTLPPSREEMTKNQVSLTCLVKGFYPSDIAVEWESNGQPENNYKTTPPVLDSDGSFFLYSKLTVDKSRWQQGNVFSCSVMHEALHNHYTQKSLSLSPG

SEQ ID NO: 1765 - protein, 370 aa, Artificial Sequence
  Description of Artificial Sequence: Synthetic polypeptide
MKHLWFFLLLVAAPRWVLSEVQLVESGGGLVQAGGSLRLSCAASGFTLENNMMGWFRQAPGKERELVSAIGWSGASTYYADSVKGRFTISADNAKNTVYLQMNSLKPEDTAVYYCAANLRGDNWGQGTQVTVSSGGGGSEPKSSDKTHTCPPCPAPELLGGPSVFLFPPKPKDTLMISRTPEVTCVVVDVSHEDPEVKFNWYVDGVEVHNAKTKPREEQYNSTYRVVSVLTVLHQDWLNGKEYKCKVSNKALPAPIEKTISKAKGQPREPQVYTLPPSREEMTKNQVSLTCLVKGFYPSDIAVEWESNGQPENNYKTTPPVLDSDGSFFLYSKLTVDKSRWQQGNVFSCSVMHEALHNHYTQKSLSLSPG

SEQ ID NO: 1766 - protein, 371 aa, Artificial Sequence
  Description of Artificial Sequence: Synthetic polypeptide
MKHLWFFLLLVAAPRWVLSEVQLVESGGGLVQAGGSLRLSCAASGNIFSRYIMGWFRQAPGKEREWVAGISSGGTTKYADSVKGRFTISADNAKNTVYLQMNSLKPEDTAVYYCAQGWKIVPTNWGQGTQVTVSSGGGGSEPKSSDKTHTCPPCPAPELLGGPSVFLFPPKPKDTLMISRTPEVTCVVVDVSHEDPEVKFNWYVDGVEVHNAKTKPREEQYNSTYRVVSVLTVLHQDWLNGKEYKCKVSNKALPAPIEKTISKAKGQPREPQVYTLPPSREEMTKNQVSLTCLVKGFYPSDIAVEWESNGQPENNYKTTPPVLDSDGSFFLYSKLTVDKSRWQQGNVFSCSVMHEALHNHYTQKSLSLSPG

SEQ ID NO: 1767 - protein, 377 aa, Artificial Sequence
  Description of Artificial Sequence: Synthetic polypeptide
MKHLWFFLLLVAAPRWVLSEVQLVESGGGLVQAGGSLRLSCAASGNIDRLYAMGWFRQAPGKEREGISLITSDDGSTYYADSVKGRFTISADNAKNTVYLQMNSLKPEDTAVYYCASSGPADARNGERWAWGQGTQVTVSSGGGGSEPKSSDKTHTCPPCPAPELLGGPSVFLFPPKPKDTLMISRTPEVTCVVVDVSHEDPEVKFNWYVDGVEVHNAKTKPREEQYNSTYRVVSVLTVLHQDWLNGKEYKCKVSNKALPAPIEKTISKAKGQPREPQVYTLPPSREEMTKNQVSLTCLVKGFYPSDIAVEWESNGQPENNYKTTPPVLDSDGSFFLYSKLTVDKSRWQQGNVFSCSVMHEALHNHYTQKSLSLSPG

SEQ ID NO: 1768 - protein, 371 aa, Artificial Sequence
  Description of Artificial Sequence: Synthetic polypeptide
MKHLWFFLLLVAAPRWVLSEVQLVESGGGLVQAGGSLRLSCAASGSIASIHAIGWFRQAPGKEREWVSSVYIFGGSTYYADSVKGRFTISADNAKNTVYLQMNSLKPEDTAVYYCANSNKPKFDWGQGTQVTVSSGGGGSEPKSSDKTHTCPPCPAPELLGGPSVFLFPPKPKDTLMISRTPEVTCVVVDVSHEDPEVKFNWYVDGVEVHNAKTKPREEQYNSTYRVVSVLTVLHQDWLNGKEYKCKVSNKALPAPIEKTISKAKGQPREPQVYTLPPSREEMTKNQVSLTCLVKGFYPSDIAVEWESNGQPENNYKTTPPVLDSDGSFFLYSKLTVDKSRWQQGNVFSCSVMHEALHNHYTQKSLSLSPG

SEQ ID NO: 1769 - protein, 371 aa, Artificial Sequence
  Description of Artificial Sequence: Synthetic polypeptide
MKHLWFFLLLVAAPRWVLSEVQLVESGGGLVQAGGSLRLSCAASGRTFSSKAMGWFRQAPGKEREWVSSVYIFGGSTYYADSVKGRFTISADNAKNTVYLQMNSLKPEDTAVYYCANSNKPKFDWGQGTQVTVSSGGGGSEPKSSDKTHTCPPCPAPELLGGPSVFLFPPKPKDTLMISRTPEVTCVVVDVSHEDPEVKFNWYVDGVEVHNAKTKPREEQYNSTYRVVSVLTVLHQDWLNGKEYKCKVSNKALPAPIEKTISKAKGQPREPQVYTLPPSREEMTKNQVSLTCLVKGFYPSDIAVEWESNGQPENNYKTTPPVLDSDGSFFLYSKLTVDKSRWQQGNVFSCSVMHEALHNHYTQKSLSLSPG

SEQ ID NO: 1770 - protein, 371 aa, Artificial Sequence
  Description of Artificial Sequence: Synthetic polypeptide
MKHLWFFLLLVAAPRWVLSEVQLVESGGGLVQAGGSLRLSCAASGSIASFNAMGWFRQAPGKEREWVSSVYIFGGSTYYADSVKGRFTISADNAKNTVYLQMNSLKPEDTAVYYCANSNKPKFDWGQGTQVTVSSGGGGSEPKSSDKTHTCPPCPAPELLGGPSVFLFPPKPKDTLMISRTPEVTCVVVDVSHEDPEVKFNWYVDGVEVHNAKTKPREEQYNSTYRVVSVLTVLHQDWLNGKEYKCKVSNKALPAPIEKTISKAKGQPREPQVYTLPPSREEMTKNQVSLTCLVKGFYPSDIAVEWESNGQPENNYKTTPPVLDSDGSFFLYSKLTVDKSRWQQGNVFSCSVMHEALHNHYTQKSLSLSPG

SEQ ID NO: 1771 - protein, 373 aa, Artificial Sequence
  Description of Artificial Sequence: Synthetic polypeptide
MKHLWFFLLLVAAPRWVLSEVQLVESGGGLVQAGGSLRLSCAASGFTFSTSWMGWFRQAPGKEREWVVGISSGGSTHYADSVKGRFTISADNAKNTVYLQMNSLKPEDTAVYYCAADVWYGSTWRNWGQGTQVTVSSGGGGSEPKSSDKTHTCPPCPAPELLGGPSVFLFPPKPKDTLMISRTPEVTCVVVDVSHEDPEVKFNWYVDGVEVHNAKTKPREEQYNSTYRVVSVLTVLHQDWLNGKEYKCKVSNKALPAPIEKTISKAKGQPREPQVYTLPPSREEMTKNQVSLTCLVKGFYPSDIAVEWESNGQPENNYKTTPPVLDSDGSFFLYSKLTVDKSRWQQGNVFSCSVMHEALHNHYTQKSLSLSPG

SEQ ID NO: 1772 - protein, 373 aa, Artificial Sequence
  Description of Artificial Sequence: Synthetic polypeptide
MKHLWFFLLLVAAPRWVLSEVQLVESGGGLVQAGGSLRLSCAASGFTFSGNWMGWFRQAPGKEREWVVGISSGGSTHYADSVKGRFTISADNAKNTVYLQMNSLKPEDTAVYYCAADVWYGSTWRNWGQGTQVTVSSGGGGSEPKSSDKTHTCPPCPAPELLGGPSVFLFPPKPKDTLMISRTPEVTCVVVDVSHEDPEVKFNWYVDGVEVHNAKTKPREEQYNSTYRVVSVLTVLHQDWLNGKEYKCKVSNKALPAPIEKTISKAKGQPREPQVYTLPPSREEMTKNQVSLTCLVKGFYPSDIAVEWESNGQPENNYKTTPPVLDSDGSFFLYSKLTVDKSRWQQGNVFSCSVMHEALHNHYTQKSLSLSPG

SEQ ID NO: 1773 - protein, 373 aa, Artificial Sequence
  Description of Artificial Sequence: Synthetic polypeptide
MKHLWFFLLLVAAPRWVLSEVQLVESGGGLVQAGGSLRLSCAASGRTFSSYAMMGWFRQAPGKEREFLAIITDGSKTLYADSVKGRFTISADNAKNTVYLQMNSLKPEDTAVYYCAAQFILARHLVWGQGTQVTVSSGGGGSEPKSSDKTHTCPPCPAPELLGGPSVFLFPPKPKDTLMISRTPEVTCVVVDVSHEDPEVKFNWYVDGVEVHNAKTKPREEQYNSTYRVVSVLTVLHQDWLNGKEYKCKVSNKALPAPIEKTISKAKGQPREPQVYTLPPSREEMTKNQVSLTCLVKGFYPSDIAVEWESNGQPENNYKTTPPVLDSDGSFFLYSKLTVDKSRWQQGNVFSCSVMHEALHNHYTQKSLSLSPG

SEQ ID NO: 1774 - protein, 370 aa, Artificial Sequence
  Description of Artificial Sequence: Synthetic polypeptide
MKHLWFFLLLVAAPRWVLSEVQLVESGGGLVQAGGSLRLSCAASGITITTEVMGWFRQAPGKEREYVAAIHWNGDSTAYADSVKGRFTISADNAKNTVYLQMNSLKPEDTAVYYCAQVSQWRAWGQGTQVTVSSGGGGSEPKSSDKTHTCPPCPAPELLGGPSVFLFPPKPKDTLMISRTPEVTCVVVDVSHEDPEVKFNWYVDGVEVHNAKTKPREEQYNSTYRVVSVLTVLHQDWLNGKEYKCKVSNKALPAPIEKTISKAKGQPREPQVYTLPPSREEMTKNQVSLTCLVKGFYPSDIAVEWESNGQPENNYKTTPPVLDSDGSFFLYSKLTVDKSRWQQGNVFSCSVMHEALHNHYTQKSLSLSPG

SEQ ID NO: 1775 - protein, 373 aa, Artificial Sequence
  Description of Artificial Sequence: Synthetic polypeptide
MKHLWFFLLLVAAPRWVLSEVQLVESGGGLVQAGGSLRLSCAASGFTFSTSWMGWFRQAPGKERELVAARNSGGNTNYADSVKGRFTISADNAKNTVYLQMNSLKPEDTAVYYCAADVWYGSTWRNWGQGTQVTVSSGGGGSEPKSSDKTHTCPPCPAPELLGGPSVFLFPPKPKDTLMISRTPEVTCVVVDVSHEDPEVKFNWYVDGVEVHNAKTKPREEQYNSTYRVVSVLTVLHQDWLNGKEYKCKVSNKALPAPIEKTISKAKGQPREPQVYTLPPSREEMTKNQVSLTCLVKGFYPSDIAVEWESNGQPENNYKTTPPVLDSDGSFFLYSKLTVDKSRWQQGNVFSCSVMHEALHNHYTQKSLSLSPG

SEQ ID NO: 1776 - protein, 374 aa, Artificial Sequence
  Description of Artificial Sequence: Synthetic polypeptide
MKHLWFFLLLVAAPRWVLSEVQLVESGGGLVQAGGSLRLSCAASGVTLDLYAMGWFRQAPGKEREFVAGIWRSGGSTVYADSVKGRFTISADNAKNTVYLQMNSLKPEDTAVYYCATWTTTWGRNRDWGQGTQVTVSSGGGGSEPKSSDKTHTCPPCPAPELLGGPSVFLFPPKPKDTLMISRTPEVTCVVVDVSHEDPEVKFNWYVDGVEVHNAKTKPREEQYNSTYRVVSVLTVLHQDWLNGKEYKCKVSNKALPAPIEKTISKAKGQPREPQVYTLPPSREEMTKNQVSLTCLVKGFYPSDIAVEWESNGQPENNYKTTPPVLDSDGSFFLYSKLTVDKSRWQQGNVFSCSVMHEALHNHYTQKSLSLSPG

SEQ ID NO: 1777 - protein, 368 aa, Artificial Sequence
  Description of Artificial Sequence: Synthetic polypeptide
MKHLWFFLLLVAAPRWVLSEVQLVESGGGLVQAGGSLRLSCAASGGTFSGGFMGWFRQAPGKEREWVASVLRGGYTWYADSVKGRFTISADNAKNTVYLQMNSLKPEDTAVYYCANGGSSYWGQGTQVTVSSGGGGSEPKSSDKTHTCPPCPAPELLGGPSVFLFPPKPKDTLMISRTPEVTCVVVDVSHEDPEVKFNWYVDGVEVHNAKTKPREEQYNSTYRVVSVLTVLHQDWLNGKEYKCKVSNKALPAPIEKTISKAKGQPREPQVYTLPPSREEMTKNQVSLTCLVKGFYPSDIAVEWESNGQPENNYKTTPPVLDSDGSFFLYSKLTVDKSRWQQGNVFSCSVMHEALHNHYTQKSLSLSPG

SEQ ID NO: 1778 - protein, 372 aa, Artificial Sequence
  Description of Artificial Sequence: Synthetic polypeptide
MKHLWFFLLLVAAPRWVLSEVQLVESGGGLVQAGGSLRLSCAASGRTFSTYASMWWFRQAPGKEREFLAIITDGSKTLYADSVKGRFTISADNAKNTVYLQMNSLKPEDTAVYYCAGSWSYPGLTWGQGTQVTVSSGGGGSEPKSSDKTHTCPPCPAPELLGGPSVFLFPPKPKDTLMISRTPEVTCVVVDVSHEDPEVKFNWYVDGVEVHNAKTKPREEQYNSTYRVVSVLTVLHQDWLNGKEYKCKVSNKALPAPIEKTISKAKGQPREPQVYTLPPSREEMTKNQVSLTCLVKGFYPSDIAVEWESNGQPENNYKTTPPVLDSDGSFFLYSKLTVDKSRWQQGNVFSCSVMHEALHNHYTQKSLSLSPG

SEQ ID NO: 1779 - protein, 373 aa, Artificial Sequence
  Description of Artificial Sequence: Synthetic polypeptide
MKHLWFFLLLVAAPRWVLSEVQLVESGGGLVQAGGSLRLSCAASGFTMSSSWMGWFRQAPGKEREWVVGISSGGSTHYADSVKGRFTISADNAKNTVYLQMNSLKPEDTAVYYCAADVWYGSTWRNWGQGTQVTVSSGGGGSEPKSSDKTHTCPPCPAPELLGGPSVFLFPPKPKDTLMISRTPEVTCVVVDVSHEDPEVKFNWYVDGVEVHNAKTKPREEQYNSTYRVVSVLTVLHQDWLNGKEYKCKVSNKALPAPIEKTISKAKGQPREPQVYTLPPSREEMTKNQVSLTCLVKGFYPSDIAVEWESNGQPENNYKTTPPVLDSDGSFFLYSKLTVDKSRWQQGNVFSCSVMHEALHNHYTQKSLSLSPG

SEQ ID NO: 1780 - protein, 378 aa, Artificial Sequence
  Description of Artificial Sequence: Synthetic polypeptide
MKHLWFFLLLVAAPRWVLSEVQLVESGGGLVQAGGSLRLSCAASGFPVNRYSMGWFRQAPGKERELVSAIGWSGASTYYADSVKGRFTISADNAKNTVYLQMNSLKPEDTAVYYCAADFWLARLRVADDYDWGQGTQVTVSSGGGGSEPKSSDKTHTCPPCPAPELLGGPSVFLFPPKPKDTLMISRTPEVTCVVVDVSHEDPEVKFNWYVDGVEVHNAKTKPREEQYNSTYRVVSVLTVLHQDWLNGKEYKCKVSNKALPAPIEKTISKAKGQPREPQVYTLPPSREEMTKNQVSLTCLVKGFYPSDIAVEWESNGQPENNYKTTPPVLDSDGSFFLYSKLTVDKSRWQQGNVFSCSVMHEALHNHYTQKSLSLSPG

SEQ ID NO: 1781 - protein, 371 aa, Artificial Sequence
  Description of Artificial Sequence: Synthetic polypeptide
MKHLWFFLLLVAAPRWVLSEVQLVESGGGLVQAGGSLRLSCAASGNIFSRYIMGWFRQAPGKEREWVAGISNGGTTKYADSVKGRFTISADNAKNTVYLQMNSLKPEDTAVYYCAQGWKIVPTNWGQGTQVTVSSGGGGSEPKSSDKTHTCPPCPAPELLGGPSVFLFPPKPKDTLMISRTPEVTCVVVDVSHEDPEVKFNWYVDGVEVHNAKTKPREEQYNSTYRVVSVLTVLHQDWLNGKEYKCKVSNKALPAPIEKTISKAKGQPREPQVYTLPPSREEMTKNQVSLTCLVKGFYPSDIAVEWESNGQPENNYKTTPPVLDSDGSFFLYSKLTVDKSRWQQGNVFSCSVMHEALHNHYTQKSLSLSPG

SEQ ID NO: 1782 - protein, 367 aa, Artificial Sequence
  Description of Artificial Sequence: Synthetic polypeptide
MKHLWFFLLLVAAPRWVLSEVQLVESGGGLVQAGGSLRLSCAASGRSFSNYVMGWFRQAPGKERERVATITSGGLTVYADSVKGRFTISADNAKNTVYLQMNSLKPEDTAVYYCALYRVNWGQGTQVTVSSGGGGSEPKSSDKTHTCPPCPAPELLGGPSVFLFPPKPKDTLMISRTPEVTCVVVDVSHEDPEVKFNWYVDGVEVHNAKTKPREEQYNSTYRVVSVLTVLHQDWLNGKEYKCKVSNKALPAPIEKTISKAKGQPREPQVYTLPPSREEMTKNQVSLTCLVKGFYPSDIAVEWESNGQPENNYKTTPPVLDSDGSFFLYSKLTVDKSRWQQGNVFSCSVMHEALHNHYTQKSLSLSPG

SEQ ID NO: 1783 - protein, 373 aa, Artificial Sequence
  Description of Artificial Sequence: Synthetic polypeptide
MKHLWFFLLLVAAPRWVLSEVQLVESGGGLVQAGGSLRLSCAASGSIFSISDMGWFRQAPGKEREFVGAINWLSESTYYADSVKGRFTISADNAKNTVYLQMNSLKPEDTAVYYCAAQGGVLSGWDWGQGTQVTVSSGGGGSEPKSSDKTHTCPPCPAPELLGGPSVFLFPPKPKDTLMISRTPEVTCVVVDVSHEDPEVKFNWYVDGVEVHNAKTKPREEQYNSTYRVVSVLTVLHQDWLNGKEYKCKVSNKALPAPIEKTISKAKGQPREPQVYTLPPSREEMTKNQVSLTCLVKGFYPSDIAVEWESNGQPENNYKTTPPVLDSDGSFFLYSKLTVDKSRWQQGNVFSCSVMHEALHNHYTQKSLSLSPG

SEQ ID NO: 1784 - protein, 367 aa, Artificial Sequence
  Description of Artificial Sequence: Synthetic polypeptide
MKHLWFFLLLVAAPRWVLSEVQLVESGGGLVQAGGSLRLSCAASGRTFSNYFMGWFRQAPGKERESVATVTWRDNITYYADSVKGRFTISADNAKNTVYLQMNSLKPEDTAVYYCASAGRWGQGTQVTVSSGGGGSEPKSSDKTHTCPPCPAPELLGGPSVFLFPPKPKDTLMISRTPEVTCVVVDVSHEDPEVKFNWYVDGVEVHNAKTKPREEQYNSTYRVVSVLTVLHQDWLNGKEYKCKVSNKALPAPIEKTISKAKGQPREPQVYTLPPSREEMTKNQVSLTCLVKGFYPSDIAVEWESNGQPENNYKTTPPVLDSDGSFFLYSKLTVDKSRWQQGNVFSCSVMHEALHNHYTQKSLSLSPG

SEQ ID NO: 1785 - protein, 367 aa, Artificial Sequence
  Description of Artificial Sequence: Synthetic polypeptide
MKHLWFFLLLVAAPRWVLSEVQLVESGGGLVQAGGSLRLSCAASGLTFSNYVMGWFRQAPGKERESVAAINWDSARTYYADSVKGRFTISADNAKNTVYLQMNSLKPEDTAVYYCASAGRWGQGTQVTVSSGGGGSEPKSSDKTHTCPPCPAPELLGGPSVFLFPPKPKDTLMISRTPEVTCVVVDVSHEDPEVKFNWYVDGVEVHNAKTKPREEQYNSTYRVVSVLTVLHQDWLNGKEYKCKVSNKALPAPIEKTISKAKGQPREPQVYTLPPSREEMTKNQVSLTCLVKGFYPSDIAVEWESNGQPENNYKTTPPVLDSDGSFFLYSKLTVDKSRWQQGNVFSCSVMHEALHNHYTQKSLSLSPG

SEQ ID NO: 1786 - protein, 378 aa, Artificial Sequence
  Description of Artificial Sequence: Synthetic polypeptide
MKHLWFFLLLVAAPRWVLSEVQLVESGGGLVQAGGSLRLSCAASGFTFRSFGMGWFRQAPGKEREFVASTIWSRGDTYYADSVKGRFTISADNAKNTVYLQMNSLKPEDTAVYYCASSPYGPLYRSTHYYDWGQGTQVTVSSGGGGSEPKSSDKTHTCPPCPAPELLGGPSVFLFPPKPKDTLMISRTPEVTCVVVDVSHEDPEVKFNWYVDGVEVHNAKTKPREEQYNSTYRVVSVLTVLHQDWLNGKEYKCKVSNKALPAPIEKTISKAKGQPREPQVYTLPPSREEMTKNQVSLTCLVKGFYPSDIAVEWESNGQPENNYKTTPPVLDSDGSFFLYSKLTVDKSRWQQGNVFSCSVMHEALHNHYTQKSLSLSPG

SEQ ID NO: 1787 - protein, 373 aa, Artificial Sequence
  Description of Artificial Sequence: Synthetic polypeptide
MKHLWFFLLLVAAPRWVLSEVQLVESGGGLVQAGGSLRLSCAASGNTFSGGFMGWFRQAPGKEREWVASVLRGGYTWYADSVKGRFTISADNAKNTVYLQMNSLKPEDTAVYYCATGWQSTTKSQGWGQGTQVTVSSGGGGSEPKSSDKTHTCPPCPAPELLGGPSVFLFPPKPKDTLMISRTPEVTCVVVDVSHEDPEVKFNWYVDGVEVHNAKTKPREEQYNSTYRVVSVLTVLHQDWLNGKEYKCKVSNKALPAPIEKTISKAKGQPREPQVYTLPPSREEMTKNQVSLTCLVKGFYPSDIAVEWESNGQPENNYKTTPPVLDSDGSFFLYSKLTVDKSRWQQGNVFSCSVMHEALHNHYTQKSLSLSPG

SEQ ID NO: 1788 - protein, 369 aa, Artificial Sequence
  Description of Artificial Sequence: Synthetic polypeptide
MKHLWFFLLLVAAPRWVLSEVQLVESGGGLVQAGGSLRLSCAASGLTISTYPMGWFRQAPGKEREFVAAVNWSGRRELYADSVKGRFTISADNAKNTVYLQMNSLKPEDTAVYYCAAFREYHWGQGTQVTVSSGGGGSEPKSSDKTHTCPPCPAPELLGGPSVFLFPPKPKDTLMISRTPEVTCVVVDVSHEDPEVKFNWYVDGVEVHNAKTKPREEQYNSTYRVVSVLTVLHQDWLNGKEYKCKVSNKALPAPIEKTISKAKGQPREPQVYTLPPSREEMTKNQVSLTCLVKGFYPSDIAVEWESNGQPENNYKTTPPVLDSDGSFFLYSKLTVDKSRWQQGNVFSCSVMHEALHNHYTQKSLSLSPG

SEQ ID NO: 1789 - protein, 376 aa, Artificial Sequence
  Description of Artificial Sequence: Synthetic polypeptide
MKHLWFFLLLVAAPRWVLSEVQLVESGGGLVQAGGSLRLSCAASGPTFSIYDMGWFRQAPGKEREFVAAITWNSGRIGYADSVKGRFTISADNAKNTVYLQMNSLKPEDTAVYYCAAGVWSSLRHTAANWGQGTQVTVSSGGGGSEPKSSDKTHTCPPCPAPELLGGPSVFLFPPKPKDTLMISRTPEVTCVVVDVSHEDPEVKFNWYVDGVEVHNAKTKPREEQYNSTYRVVSVLTVLHQDWLNGKEYKCKVSNKALPAPIEKTISKAKGQPREPQVYTLPPSREEMTKNQVSLTCLVKGFYPSDIAVEWESNGQPENNYKTTPPVLDSDGSFFLYSKLTVDKSRWQQGNVFSCSVMHEALHNHYTQKSLSLSPG

SEQ ID NO: 1790 - protein, 374 aa, Artificial Sequence
  Description of Artificial Sequence: Synthetic polypeptide
MKHLWFFLLLVAAPRWVLSEVQLVESGGGLVQAGGSLRLSCAASGFAFGDSWMGWFRQAPGKEREWVSGISSGGGRTYYADSVKGRFTISADNAKNTVYLQMNSLKPEDTAVYYCAADVWYGSTWRNWGQGTQVTVSSGGGGSEPKSSDKTHTCPPCPAPELLGGPSVFLFPPKPKDTLMISRTPEVTCVVVDVSHEDPEVKFNWYVDGVEVHNAKTKPREEQYNSTYRVVSVLTVLHQDWLNGKEYKCKVSNKALPAPIEKTISKAKGQPREPQVYTLPPSREEMTKNQVSLTCLVKGFYPSDIAVEWESNGQPENNYKTTPPVLDSDGSFFLYSKLTVDKSRWQQGNVFSCSVMHEALHNHYTQKSLSLSPG

SEQ ID NO: 1791 - protein, 373 aa, Artificial Sequence
  Description of Artificial Sequence: Synthetic polypeptide
MKHLWFFLLLVAAPRWVLSEVQLVESGGGLVQPGGSLRLSCAASGFTFDRSWMGWFRQAPGKEREVVASITSGGSTYYADSVKGRFTISADNSKNTAYLQMNSLKPEDTAVYYCAADVWYGSTWRNWGQGTLVTVSSGGGGSEPKSSDKTHTCPPCPAPELLGGPSVFLFPPKPKDTLMISRTPEVTCVVVDVSHEDPEVKFNWYVDGVEVHNAKTKPREEQYNSTYRVVSVLTVLHQDWLNGKEYKCKVSNKALPAPIEKTISKAKGQPREPQVYTLPPSREEMTKNQVSLTCLVKGFYPSDIAVEWESNGQPENNYKTTPPVLDSDGSFFLYSKLTVDKSRWQQGNVFSCSVMHEALHNHYTQKSLSLSPG

SEQ ID NO: 1792 - protein, 371 aa, Artificial Sequence
  Description of Artificial Sequence: Synthetic polypeptide
MKHLWFFLLLVAAPRWVLSEVQLVESGGGLVQPGGSLRLSCAASGRTFGDYIMGWFRQAPGKERELVAEITRSGRTNYADSVKGRFTISADNSKNTAYLQMNSLKPEDTAVYYCAAVFSRGPLTWGQGTLVTVSSGGGGSEPKSSDKTHTCPPCPAPELLGGPSVFLFPPKPKDTLMISRTPEVTCVVVDVSHEDPEVKFNWYVDGVEVHNAKTKPREEQYNSTYRVVSVLTVLHQDWLNGKEYKCKVSNKALPAPIEKTISKAKGQPREPQVYTLPPSREEMTKNQVSLTCLVKGFYPSDIAVEWESNGQPENNYKTTPPVLDSDGSFFLYSKLTVDKSRWQQGNVFSCSVMHEALHNHYTQKSLSLSPG

SEQ ID NO: 1793 - protein, 374 aa, Artificial Sequence
  Description of Artificial Sequence: Synthetic polypeptide
MKHLWFFLLLVAAPRWVLSEVQLVESGGGLVQPGGSLRLSCAASGFTFSGNWMGWFRQAPGKEREFVASISSSGISTYYADSVKGRFTISADNSKNTAYLQMNSLKPEDTAVYYCAADVWYGSTWRNWGQGTLVTVSSGGGGSEPKSSDKTHTCPPCPAPELLGGPSVFLFPPKPKDTLMISRTPEVTCVVVDVSHEDPEVKFNWYVDGVEVHNAKTKPREEQYNSTYRVVSVLTVLHQDWLNGKEYKCKVSNKALPAPIEKTISKAKGQPREPQVYTLPPSREEMTKNQVSLTCLVKGFYPSDIAVEWESNGQPENNYKTTPPVLDSDGSFFLYSKLTVDKSRWQQGNVFSCSVMHEALHNHYTQKSLSLSPG

SEQ ID NO: 1794 - protein, 373 aa, Artificial Sequence
  Description of Artificial Sequence: Synthetic polypeptide
MKHLWFFLLLVAAPRWVLSEVQLVESGGGLVQPGGSLRLSCAASGFPVNRYWMGWFRQAPGKERELVATITSGGSTNYADSVKGRFTISADNSKNTAYLQMNSLKPEDTAVYYCAADVWYGSTWRNWGQGTLVTVSSGGGGSEPKSSDKTHTCPPCPAPELLGGPSVFLFPPKPKDTLMISRTPEVTCVVVDVSHEDPEVKFNWYVDGVEVHNAKTKPREEQYNSTYRVVSVLTVLHQDWLNGKEYKCKVSNKALPAPIEKTISKAKGQPREPQVYTLPPSREEMTKNQVSLTCLVKGFYPSDIAVEWESNGQPENNYKTTPPVLDSDGSFFLYSKLTVDKSRWQQGNVFSCSVMHEALHNHYTQKSLSLSPG

SEQ ID NO: 1795 - protein, 371 aa, Artificial Sequence
  Description of Artificial Sequence: Synthetic polypeptide
MKHLWFFLLLVAAPRWVLSEVQLVESGGGLVQPGGSLRLSCAASGRTFGDYIMGWFRQAPGKEREFVATISRGGGSTYVDSVKGRFTISADNSKNTAYLQMNSLKPEDTAVYYCAAVFSRGPLTWGQGTLVTVSSGGGGSEPKSSDKTHTCPPCPAPELLGGPSVFLFPPKPKDTLMISRTPEVTCVVVDVSHEDPEVKFNWYVDGVEVHNAKTKPREEQYNSTYRVVSVLTVLHQDWLNGKEYKCKVSNKALPAPIEKTISKAKGQPREPQVYTLPPSREEMTKNQVSLTCLVKGFYPSDIAVEWESNGQPENNYKTTPPVLDSDGSFFLYSKLTVDKSRWQQGNVFSCSVMHEALHNHYTQKSLSLSPG

SEQ ID NO: 1796 - protein, 373 aa, Artificial Sequence
  Description of Artificial Sequence: Synthetic polypeptide
MKHLWFFLLLVAAPRWVLSEVQLVESGGGLVQPGGSLRLSCAASGFTFSTSWMGWFRQAPGKERELVASITSGGSTYYADSVKGRFTISADNSKNTAYLQMNSLKPEDTAVYYCAADVWYGSTWRNWGQGTLVTVSSGGGGSEPKSSDKTHTCPPCPAPELLGGPSVFLFPPKPKDTLMISRTPEVTCVVVDVSHEDPEVKFNWYVDGVEVHNAKTKPREEQYNSTYRVVSVLTVLHQDWLNGKEYKCKVSNKALPAPIEKTISKAKGQPREPQVYTLPPSREEMTKNQVSLTCLVKGFYPSDIAVEWESNGQPENNYKTTPPVLDSDGSFFLYSKLTVDKSRWQQGNVFSCSVMHEALHNHYTQKSLSLSPG

SEQ ID NO: 1797 - protein, 384 aa, Artificial Sequence
  Description of Artificial Sequence: Synthetic polypeptide
MKHLWFFLLLVAAPRWVLSEVQLVESGGGLVQPGGSLRLSCAASGSTFSINRMGWFRQAPGKEREWVATIVHSGGHSGGTSYYADSVKGRFTISADNSKNTAYLQMNSLKPEDTAVYYCAARPYTRPGSMWVSSLYDWGQGTLVTVSSGGGGSEPKSSDKTHTCPPCPAPELLGGPSVFLFPPKPKDTLMISRTPEVTCVVVDVSHEDPEVKFNWYVDGVEVHNAKTKPREEQYNSTYRVVSVLTVLHQDWLNGKEYKCKVSNKALPAPIEKTISKAKGQPREPQVYTLPPSREEMTKNQVSLTCLVKGFYPSDIAVEWESNGQPENNYKTTPPVLDSDGSFFLYSKLTVDKSRWQQGNVFSCSVMHEALHNHYTQKSLSLSPG

SEQ ID NO: 1798 - protein, 373 aa, Artificial Sequence
  Description of Artificial Sequence: Synthetic polypeptide
MKHLWFFLLLVAAPRWVLSEVQLVESGGGLVQPGGSLRLSCAASGFTFSTSWMGWFRQAPGKERELVAARNSGGNTNYADSVKGRFTISADNSKNTAYLQMNSLKPEDTAVYYCAADVWYGSTWRNWGQGTLVTVSSGGGGSEPKSSDKTHTCPPCPAPELLGGPSVFLFPPKPKDTLMISRTPEVTCVVVDVSHEDPEVKFNWYVDGVEVHNAKTKPREEQYNSTYRVVSVLTVLHQDWLNGKEYKCKVSNKALPAPIEKTISKAKGQPREPQVYTLPPSREEMTKNQVSLTCLVKGFYPSDIAVEWESNGQPENNYKTTPPVLDSDGSFFLYSKLTVDKSRWQQGNVFSCSVMHEALHNHYTQKSLSLSPG

SEQ ID NO: 1799 - protein, 371 aa, Artificial Sequence
  Description of Artificial Sequence: Synthetic polypeptide
MKHLWFFLLLVAAPRWVLSEVQLVESGGGLVQPGGSLRLSCAASGGTLSGNAMGWFRQAPGKEREWVASIYWSSGNTYYADSVKGRFTISADNSKNTAYLQMNSLKPEDTAVYYCANSNKPKFDWGQGTLVTVSSGGGGSEPKSSDKTHTCPPCPAPELLGGPSVFLFPPKPKDTLMISRTPEVTCVVVDVSHEDPEVKFNWYVDGVEVHNAKTKPREEQYNSTYRVVSVLTVLHQDWLNGKEYKCKVSNKALPAPIEKTISKAKGQPREPQVYTLPPSREEMTKNQVSLTCLVKGFYPSDIAVEWESNGQPENNYKTTPPVLDSDGSFFLYSKLTVDKSRWQQGNVFSCSVMHEALHNHYTQKSLSLSPG

SEQ ID NO: 1800 - protein, 378 aa, Artificial Sequence
  Description of Artificial Sequence: Synthetic polypeptide
MKHLWFFLLLVAAPRWVLSEVQLVESGGGLVQPGGSLRLSCAASGHTFSSYGMGWFRQAPGKERELVAAISWSGISTIYADSVKGRFTISADNSKNTAYLQMNSLKPEDTAVYYCASSPYGPLYRSTHYYDWGQGTLVTVSSGGGGSEPKSSDKTHTCPPCPAPELLGGPSVFLFPPKPKDTLMISRTPEVTCVVVDVSHEDPEVKFNWYVDGVEVHNAKTKPREEQYNSTYRVVSVLTVLHQDWLNGKEYKCKVSNKALPAPIEKTISKAKGQPREPQVYTLPPSREEMTKNQVSLTCLVKGFYPSDIAVEWESNGQPENNYKTTPPVLDSDGSFFLYSKLTVDKSRWQQGNVFSCSVMHEALHNHYTQKSLSLSPG

SEQ ID NO: 1801 - protein, 373 aa, Artificial Sequence
  Description of Artificial Sequence: Synthetic polypeptide
MKHLWFFLLLVAAPRWVLSEVQLVESGGGLVQPGGSLRLSCAASGFTFSTSWMGWFRQAPGKEREFVASISTSGNTFYADSVKGRFTISADNSKNTAYLQMNSLKPEDTAVYYCAADVWYGSTWRNWGQGTLVTVSSGGGGSEPKSSDKTHTCPPCPAPELLGGPSVFLFPPKPKDTLMISRTPEVTCVVVDVSHEDPEVKFNWYVDGVEVHNAKTKPREEQYNSTYRVVSVLTVLHQDWLNGKEYKCKVSNKALPAPIEKTISKAKGQPREPQVYTLPPSREEMTKNQVSLTCLVKGFYPSDIAVEWESNGQPENNYKTTPPVLDSDGSFFLYSKLTVDKSRWQQGNVFSCSVMHEALHNHYTQKSLSLSPG

SEQ ID NO: 1802 - protein, 373 aa, Artificial Sequence
  Description of Artificial Sequence: Synthetic polypeptide
MKHLWFFLLLVAAPRWVLSEVQLVESGGGLVQPGGSLRLSCAASGFTFSRYWMGWFRQAPGKEREAVASITSGGSTYYADSVKGRFTISADNSKNTAYLQMNSLKPEDTAVYYCAADVWYGSTWRNWGQGTLVTVSSGGGGSEPKSSDKTHTCPPCPAPELLGGPSVFLFPPKPKDTLMISRTPEVTCVVVDVSHEDPEVKFNWYVDGVEVHNAKTKPREEQYNSTYRVVSVLTVLHQDWLNGKEYKCKVSNKALPAPIEKTISKAKGQPREPQVYTLPPSREEMTKNQVSLTCLVKGFYPSDIAVEWESNGQPENNYKTTPPVLDSDGSFFLYSKLTVDKSRWQQGNVFSCSVMHEALHNHYTQKSLSLSPG

SEQ ID NO: 1803 - protein, 373 aa, Artificial Sequence
  Description of Artificial Sequence: Synthetic polypeptide
MKHLWFFLLLVAAPRWVLSEVQLVESGGGLVQPGGSLRLSCAASGFTFDRSWMGWFRQAPGKEREWVASITSGGTTNYADSVKGRFTISADNSKNTAYLQMNSLKPEDTAVYYCAADVWYGSTWRNWGQGTLVTVSSGGGGSEPKSSDKTHTCPPCPAPELLGGPSVFLFPPKPKDTLMISRTPEVTCVVVDVSHEDPEVKFNWYVDGVEVHNAKTKPREEQYNSTYRVVSVLTVLHQDWLNGKEYKCKVSNKALPAPIEKTISKAKGQPREPQVYTLPPSREEMTKNQVSLTCLVKGFYPSDIAVEWESNGQPENNYKTTPPVLDSDGSFFLYSKLTVDKSRWQQGNVFSCSVMHEALHNHYTQKSLSLSPG

SEQ ID NO: 1804 - protein, 377 aa, Artificial Sequence
  Description of Artificial Sequence: Synthetic polypeptide
MKHLWFFLLLVAAPRWVLSEVQLVESGGGLVQPGGSLRLSCAASGYTFRAYVMGWFRQAPGKERELVAVINYRGSSLKYADSVKGRFTISADNSKNTAYLQMNSLKPEDTAVYYCAASEWGGSDYDHDYDWGQGTLVTVSSGGGGSEPKSSDKTHTCPPCPAPELLGGPSVFLFPPKPKDTLMISRTPEVTCVVVDVSHEDPEVKFNWYVDGVEVHNAKTKPREEQYNSTYRVVSVLTVLHQDWLNGKEYKCKVSNKALPAPIEKTISKAKGQPREPQVYTLPPSREEMTKNQVSLTCLVKGFYPSDIAVEWESNGQPENNYKTTPPVLDSDGSFFLYSKLTVDKSRWQQGNVFSCSVMHEALHNHYTQKSLSLSPG

SEQ ID NO: 1805 - protein, 378 aa, Artificial Sequence
  Description of Artificial Sequence: Synthetic polypeptide
MKHLWFFLLLVAAPRWVLSEVQLVESGGGLVQPGGSLRLSCAASGFTFSTYGMGWFRQAPGKEREFVAAISWSGVSKHYADSVKGRFTISADNSKNTAYLQMNSLKPEDTAVYYCASSPYGPLYRSTHYYDWGQGTLVTVSSGGGGSEPKSSDKTHTCPPCPAPELLGGPSVFLFPPKPKDTLMISRTPEVTCVVVDVSHEDPEVKFNWYVDGVEVHNAKTKPREEQYNSTYRVVSVLTVLHQDWLNGKEYKCKVSNKALPAPIEKTISKAKGQPREPQVYTLPPSREEMTKNQVSLTCLVKGFYPSDIAVEWESNGQPENNYKTTPPVLDSDGSFFLYSKLTVDKSRWQQGNVFSCSVMHEALHNHYTQKSLSLSPG

SEQ ID NO: 1806 - protein, 373 aa, Artificial Sequence
  Description of Artificial Sequence: Synthetic polypeptide
MKHLWFFLLLVAAPRWVLSEVQLVESGGGLVQPGGSLRLSCAASGFTFSTSWMGWFRQAPGKERELVVSVTSGGYTNYADSVKGRFTISADNSKNTAYLQMNSLKPEDTAVYYCAADVWYGSTWRNWGQGTLVTVSSGGGGSEPKSSDKTHTCPPCPAPELLGGPSVFLFPPKPKDTLMISRTPEVTCVVVDVSHEDPEVKFNWYVDGVEVHNAKTKPREEQYNSTYRVVSVLTVLHQDWLNGKEYKCKVSNKALPAPIEKTISKAKGQPREPQVYTLPPSREEMTKNQVSLTCLVKGFYPSDIAVEWESNGQPENNYKTTPPVLDSDGSFFLYSKLTVDKSRWQQGNVFSCSVMHEALHNHYTQKSLSLSPG

SEQ ID NO: 1807 - protein, 373 aa, Artificial Sequence
  Description of Artificial Sequence: Synthetic polypeptide
MKHLWFFLLLVAAPRWVLSEVQLVESGGGLVQPGGSLRLSCAASGFTMSSSWMGWFRQAPGKEREWVASINSGGTRNYADSVKGRFTISADNSKNTAYLQMNSLKPEDTAVYYCAADVWYGSTWRNWGQGTLVTVSSGGGGSEPKSSDKTHTCPPCPAPELLGGPSVFLFPPKPKDTLMISRTPEVTCVVVDVSHEDPEVKFNWYVDGVEVHNAKTKPREEQYNSTYRVVSVLTVLHQDWLNGKEYKCKVSNKALPAPIEKTISKAKGQPREPQVYTLPPSREEMTKNQVSLTCLVKGFYPSDIAVEWESNGQPENNYKTTPPVLDSDGSFFLYSKLTVDKSRWQQGNVFSCSVMHEALHNHYTQKSLSLSPG

SEQ ID NO: 1808 - protein, 373 aa, Artificial Sequence
  Description of Artificial Sequence: Synthetic polypeptide
MKHLWFFLLLVAAPRWVLSEVQLVESGGGLVQPGGSLRLSCAASGFTFSGNWMGWFRQAPGKEREFVASISSGSAINYADSVKGRFTISADNSKNTAYLQMNSLKPEDTAVYYCAADVWYGSTWRNWGQGTLVTVSSGGGGSEPKSSDKTHTCPPCPAPELLGGPSVFLFPPKPKDTLMISRTPEVTCVVVDVSHEDPEVKFNWYVDGVEVHNAKTKPREEQYNSTYRVVSVLTVLHQDWLNGKEYKCKVSNKALPAPIEKTISKAKGQPREPQVYTLPPSREEMTKNQVSLTCLVKGFYPSDIAVEWESNGQPENNYKTTPPVLDSDGSFFLYSKLTVDKSRWQQGNVFSCSVMHEALHNHYTQKSLSLSPG

SEQ ID NO: 1809 - protein, 377 aa, Artificial Sequence
  Description of Artificial Sequence: Synthetic polypeptide
MKHLWFFLLLVAAPRWVLSEVQLVESGGGLVQPGGSLRLSCAASGRTFGNYAMGWFRQAPGKEREFVADIRSSAGRTYYADSVKGRFTISADNSKNTAYLQMNSLKPEDTAVYYCAASEWGGSDYDHDYDWGQGTLVTVSSGGGGSEPKSSDKTHTCPPCPAPELLGGPSVFLFPPKPKDTLMISRTPEVTCVVVDVSHEDPEVKFNWYVDGVEVHNAKTKPREEQYNSTYRVVSVLTVLHQDWLNGKEYKCKVSNKALPAPIEKTISKAKGQPREPQVYTLPPSREEMTKNQVSLTCLVKGFYPSDIAVEWESNGQPENNYKTTPPVLDSDGSFFLYSKLTVDKSRWQQGNVFSCSVMHEALHNHYTQKSLSLSPG

SEQ ID NO: 1810 - protein, 373 aa, Artificial Sequence
  Description of Artificial Sequence: Synthetic polypeptide
MKHLWFFLLLVAAPRWVLSEVQLVESGGGLVQPGGSLRLSCAASGFTFSGNWMGWFRQAPGKEREFVAGILSDGRELYADSVKGRFTISADNSKNTAYLQMNSLKPEDTAVYYCAADVWYGSTWRNWGQGTLVTVSSGGGGSEPKSSDKTHTCPPCPAPELLGGPSVFLFPPKPKDTLMISRTPEVTCVVVDVSHEDPEVKFNWYVDGVEVHNAKTKPREEQYNSTYRVVSVLTVLHQDWLNGKEYKCKVSNKALPAPIEKTISKAKGQPREPQVYTLPPSREEMTKNQVSLTCLVKGFYPSDIAVEWESNGQPENNYKTTPPVLDSDGSFFLYSKLTVDKSRWQQGNVFSCSVMHEALHNHYTQKSLSLSPG

SEQ ID NO: 1811 - protein, 374 aa, Artificial Sequence
  Description of Artificial Sequence: Synthetic polypeptide
MKHLWFFLLLVAAPRWVLSEVQLVESGGGLVQPGGSLRLSCAASGFTLSGNWMGWFRQAPGKEREFVASISSSGISTYYADSVKGRFIISADNSKNTAYLQMNSLKPEDTAVYYCAADVWYGSTWRNWGQGTLVTVSSGGGGSEPKSSDKTHTCPPCPAPELLGGPSVFLFPPKPKDTLMISRTPEVTCVVVDVSHEDPEVKFNWYVDGVEVHNAKTKPREEQYNSTYRVVSVLTVLHQDWLNGKEYKCKVSNKALPAPIEKTISKAKGQPREPQVYTLPPSREEMTKNQVSLTCLVKGFYPSDIAVEWESNGQPENNYKTTPPVLDSDGSFFLYSKLTVDKSRWQQGNVFSCSVMHEALHNHYTQKSLSLSPG

SEQ ID NO: 1812 - protein, 376 aa, Artificial Sequence
  Description of Artificial Sequence: Synthetic polypeptide
MKHLWFFLLLVAAPRWVLSEVQLVESGGGLVQPGGSLRLSCAASGRTFSTHAMGWFRQAPGKEREFVAAITPINWGGRGTHYADSVKGRFTISADNSKNTAYLQMNSLKPEDNAVYYCAAKRLRSGRWTWGQGTLVTVSSGGGGSEPKSSDKTHTCPPCPAPELLGGPSVFLFPPKPKDTLMISRTPEVTCVVVDVSHEDPEVKFNWYVDGVEVHNAKTKPREEQYNSTYRVVSVLTVLHQDWLNGKEYKCKVSNKALPAPIEKTISKAKGQPREPQVYTLPPSREEMTKNQVSLTCLVKGFYPSDIAVEWESNGQPENNYKTTPPVLDSDGSFFLYSKLTVDKSRWQQGNVFSCSVMHEALHNHYTQKSLSLSPG

SEQ ID NO: 1813 - protein, 371 aa, Artificial Sequence
  Description of Artificial Sequence: Synthetic polypeptide
MKHLWFFLLLVAAPRWVLSEVQLVESGGGLVQPGGSLRLSCAASGFTFSNSGMGWFRQAPGKEREWVASIYWSSGNTYYADSVKGRFTISADNSKNTAYLQMNSLKPEDTAVYYCANSNKPKFDWGQGTLVTVSSGGGGSEPKSSDKTHTCPPCPAPELLGGPSVFLFPPKPKDTLMISRTPEVTCVVVDVSHEDPEVKFNWYVDGVEVHNAKTKPREEQYNSTYRVVSVLTVLHQDWLNGKEYKCKVSNKALPAPIEKTISKAKGQPREPQVYTLPPSREEMTKNQVSLTCLVKGFYPSDIAVEWESNGQPENNYKTTPPVLDSDGSFFLYSKLTVDKSRWQQGNVFSCSVMHEALHNHYTQKSLSLSPG

SEQ ID NO: 1814 - protein, 375 aa, Artificial Sequence
  Description of Artificial Sequence: Synthetic polypeptide
MKHLWFFLLLVAAPRWVLSEVQLVESGGGLVQPGGSLRLSCAASGRTFSMGWFRQAPGKEREFVATVRWGTSSTYYADSVKGRFTISADNSKNTAYLQMNSLKPEDTAVYYCAAETFGSGSSLMSEYDWGQGTLVTVSSGGGGSEPKSSDKTHTCPPCPAPELLGGPSVFLFPPKPKDTLMISRTPEVTCVVVDVSHEDPEVKFNWYVDGVEVHNAKTKPREEQYNSTYRVVSVLTVLHQDWLNGKEYKCKVSNKALPAPIEKTISKAKGQPREPQVYTLPPSREEMTKNQVSLTCLVKGFYPSDIAVEWESNGQPENNYKTTPPVLDSDGSFFLYSKLTVDKSRWQQGNVFSCSVMHEALHNHYTQKSLSLSPG

SEQ ID NO: 1815 - protein, 371 aa, Artificial Sequence
  Description of Artificial Sequence: Synthetic polypeptide
MKHLWFFLLLVAAPRWVLSEVQLVESGGGLVQPGGSLRLSCAASGNIFSRYIMGWFRQAPGKEREWVAGISNGGTTKYADSVKGRFTISADNSKNTAYLQMNSLKPEDTAVYYCAQGWKIVPTNWGQGTLVTVSSGGGGSEPKSSDKTHTCPPCPAPELLGGPSVFLFPPKPKDTLMISRTPEVTCVVVDVSHEDPEVKFNWYVDGVEVHNAKTKPREEQYNSTYRVVSVLTVLHQDWLNGKEYKCKVSNKALPAPIEKTISKAKGQPREPQVYTLPPSREEMTKNQVSLTCLVKGFYPSDIAVEWESNGQPENNYKTTPPVLDSDGSFFLYSKLTVDKSRWQQGNVFSCSVMHEALHNHYTQKSLSLSPG

SEQ ID NO: 1816 - protein, 373 aa, Artificial Sequence
  Description of Artificial Sequence: Synthetic polypeptide
MKHLWFFLLLVAAPRWVLSEVQLVESGGGLVQPGGSLRLSCAASGFTFDRSWMGWFRQAPGKERELVAAITSGGSTYYADSVKGRFTISADNSKNTAYLQMNSLKPEDTAVYYCAADVWYGSTWRNWGQGTLVTVSSGGGGSEPKSSDKTHTCPPCPAPELLGGPSVFLFPPKPKDTLMISRTPEVTCVVVDVSHEDPEVKFNWYVDGVEVHNAKTKPREEQYNSTYRVVSVLTVLHQDWLNGKEYKCKVSNKALPAPIEKTISKAKGQPREPQVYTLPPSREEMTKNQVSLTCLVKGFYPSDIAVEWESNGQPENNYKTTPPVLDSDGSFFLYSKLTVDKSRWQQGNVFSCSVMHEALHNHYTQKSLSLSPG

SEQ ID NO: 1817 - protein, 378 aa, Artificial Sequence
  Description of Artificial Sequence: Synthetic polypeptide
MKHLWFFLLLVAAPRWVLSEVQLVESGGGLVQPGGSLRLSCAASGFTFGHYAMGWFRQAPGKEREFVAAISWSGVSTYYADSVKGRFTISADNSKNTAYLQMNSLKPEDTAVYYCASSPYGPLYRSTHYYDWGQGTLVTVSSGGGGSEPKSSDKTHTCPPCPAPELLGGPSVFLFPPKPKDTLMISRTPEVTCVVVDVSHEDPEVKFNWYVDGVEVHNAKTKPREEQYNSTYRVVSVLTVLHQDWLNGKEYKCKVSNKALPAPIEKTISKAKGQPREPQVYTLPPSREEMTKNQVSLTCLVKGFYPSDIAVEWESNGQPENNYKTTPPVLDSDGSFFLYSKLTVDKSRWQQGNVFSCSVMHEALHNHYTQKSLSLSPG

SEQ ID NO: 1818 - protein, 373 aa, Artificial Sequence
  Description of Artificial Sequence: Synthetic polypeptide
MKHLWFFLLLVAAPRWVLSEVQLVESGGGLVQPGGSLRLSCAASGRTFSSYHMGWFRQAPGKERELVALISRVGVTSYADSVKGRFTISADNSKNTAYLQMNSLKPEDTAVYYCAAVRTYGSATYDWGQGTLVTVSSGGGGSEPKSSDKTHTCPPCPAPELLGGPSVFLFPPKPKDTLMISRTPEVTCVVVDVSHEDPEVKFNWYVDGVEVHNAKTKPREEQYNSTYRVVSVLTVLHQDWLNGKEYKCKVSNKALPAPIEKTISKAKGQPREPQVYTLPPSREEMTKNQVSLTCLVKGFYPSDIAVEWESNGQPENNYKTTPPVLDSDGSFFLYSKLTVDKSRWQQGNVFSCSVMHEALHNHYTQKSLSLSPG

SEQ ID NO: 1819 - protein, 367 aa, Artificial Sequence
  Description of Artificial Sequence: Synthetic polypeptide
MKHLWFFLLLVAAPRWVLSEVQLVESGGGLVQPGGSLRLSCAASGRSRMGWFRQAPGKEREFVATISWSGSAVYADSVKGRFTISADNSKNTAYLQMNSLKPEDTAVYYCAAGGRYSARVWGQGTLVTVSSGGGGSEPKSSDKTHTCPPCPAPELLGGPSVFLFPPKPKDTLMISRTPEVTCVVVDVSHEDPEVKFNWYVDGVEVHNAKTKPREEQYNSTYRVVSVLTVLHQDWLNGKEYKCKVSNKALPAPIEKTISKAKGQPREPQVYTLPPSREEMTKNQVSLTCLVKGFYPSDIAVEWESNGQPENNYKTTPPVLDSDGSFFLYSKLTVDKSRWQQGNVFSCSVMHEALHNHYTQKSLSLSPG

SEQ ID NO: 1820 - protein, 373 aa, Artificial Sequence
  Description of Artificial Sequence: Synthetic polypeptide
MKHLWFFLLLVAAPRWVLSEVQLVESGGGLVQPGGSLRLSCAASGRTYNMGWFRQAPGKEREWVATIYSRSGGSTTYYADSVKGRFTISADNSKNTAYLQMNSLKPEDTAVYYCATYGYDSGRYYSWGQGTLVTVSSGGGGSEPKSSDKTHTCPPCPAPELLGGPSVFLFPPKPKDTLMISRTPEVTCVVVDVSHEDPEVKFNWYVDGVEVHNAKTKPREEQYNSTYRVVSVLTVLHQDWLNGKEYKCKVSNKALPAPIEKTISKAKGQPREPQVYTLPPSREEMTKNQVSLTCLVKGFYPSDIAVEWESNGQPENNYKTTPPVLDSDGSFFLYSKLTVDKSRWQQGNVFSCSVMHEALHNHYTQKSLSLSPG

SEQ ID NO: 1821 - protein, 373 aa, Artificial Sequence
  Description of Artificial Sequence: Synthetic polypeptide
MKHLWFFLLLVAAPRWVLSEVQLVESGGGLVQPGGSLRLSCAASGFTLSGNWMGWFRQAPGKEREFVASISSGGGTNYADSVKGRFTISADNSKNTAYLQMNSLKPEDTAVYYCAADVWYGSTWRNWGQGTLVTVSSGGGGSEPKSSDKTHTCPPCPAPELLGGPSVFLFPPKPKDTLMISRTPEVTCVVVDVSHEDPEVKFNWYVDGVEVHNAKTKPREEQYNSTYRVVSVLTVLHQDWLNGKEYKCKVSNKALPAPIEKTISKAKGQPREPQVYTLPPSREEMTKNQVSLTCLVKGFYPSDIAVEWESNGQPENNYKTTPPVLDSDGSFFLYSKLTVDKSRWQQGNVFSCSVMHEALHNHYTQKSLSLSPG

SEQ ID NO: 1822 - protein, 373 aa, Artificial Sequence
  Description of Artificial Sequence: Synthetic polypeptide
MKHLWFFLLLVAAPRWVLSEVQLVESGGGLVQPGGSLRLSCAASGFTFSTSWMGWFRQAPGKERELVAAMTSGGGTNYADSVKGRFTISADNSKNTAYLQMNSLKPEDTAVYYCAADVWYGSTWRNWGQGTLVTVSSGGGGSEPKSSDKTHTCPPCPAPELLGGPSVFLFPPKPKDTLMISRTPEVTCVVVDVSHEDPEVKFNWYVDGVEVHNAKTKPREEQYNSTYRVVSVLTVLHQDWLNGKEYKCKVSNKALPAPIEKTISKAKGQPREPQVYTLPPSREEMTKNQVSLTCLVKGFYPSDIAVEWESNGQPENNYKTTPPVLDSDGSFFLYSKLTVDKSRWQQGNVFSCSVMHEALHNHYTQKSLSLSPG

SEQ ID NO: 1823 - protein, 373 aa, Artificial Sequence
  Description of Artificial Sequence: Synthetic polypeptide
MKHLWFFLLLVAAPRWVLSEVQLVESGGGLVQPGGSLRLSCAASGFTFSTSWMGWFRQAPGKERELVASITSGGSTNYADSVKGRFTISADNSKNTAYLQMNSLKPEDTAVYYCAADVWYGSTWRNWGQGTLVTVSSGGGGSEPKSSDKTHTCPPCPAPELLGGPSVFLFPPKPKDTLMISRTPEVTCVVVDVSHEDPEVKFNWYVDGVEVHNAKTKPREEQYNSTYRVVSVLTVLHQDWLNGKEYKCKVSNKALPAPIEKTISKAKGQPREPQVYTLPPSREEMTKNQVSLTCLVKGFYPSDIAVEWESNGQPENNYKTTPPVLDSDGSFFLYSKLTVDKSRWQQGNVFSCSVMHEALHNHYTQKSLSLSPG

SEQ ID NO: 1824 - protein, 377 aa, Artificial Sequence
  Description of Artificial Sequence: Synthetic polypeptide
MKHLWFFLLLVAAPRWVLSEVQLVESGGGLVQPGGSLRLSCAASGRSRYGMGWFRQAPGKEREFVSAISWSGISTYYADSVKGRFTISADNSKNTAYLQMNSLKPEDTAVYYCAATQWGSSGWKQARWYDWGQGTLVTVSSGGGGSEPKSSDKTHTCPPCPAPELLGGPSVFLFPPKPKDTLMISRTPEVTCVVVDVSHEDPEVKFNWYVDGVEVHNAKTKPREEQYNSTYRVVSVLTVLHQDWLNGKEYKCKVSNKALPAPIEKTISKAKGQPREPQVYTLPPSREEMTKNQVSLTCLVKGFYPSDIAVEWESNGQPENNYKTTPPVLDSDGSFFLYSKLTVDKSRWQQGNVFSCSVMHEALHNHYTQKSLSLSPG

SEQ ID NO: 1825 - protein, 373 aa, Artificial Sequence
  Description of Artificial Sequence: Synthetic polypeptide
MKHLWFFLLLVAAPRWVLSEVQLVESGGGLVQPGGSLRLSCAASGFTFSTSWMGWFRQAPGKERELVASITSGGTTNYADSVKGRFTISADNSKNTAYLQMNSLKPEDTAVYYCAADVWYGSTWRNWGQGTLVTVSSGGGGSEPKSSDKTHTCPPCPAPELLGGPSVFLFPPKPKDTLMISRTPEVTCVVVDVSHEDPEVKFNWYVDGVEVHNAKTKPREEQYNSTYRVVSVLTVLHQDWLNGKEYKCKVSNKALPAPIEKTISKAKGQPREPQVYTLPPSREEMTKNQVSLTCLVKGFYPSDIAVEWESNGQPENNYKTTPPVLDSDGSFFLYSKLTVDKSRWQQGNVFSCSVMHEALHNHYTQKSLSLSPG

SEQ ID NO: 1826 - protein, 373 aa, Artificial Sequence
  Description of Artificial Sequence: Synthetic polypeptide
MKHLWFFLLLVAAPRWVLSEVQLVESGGGLVQPGGSLRLSCAASGFTFDRSWMGWFRQAPGKERELVASVTSGGTTNYADSVKGRFTISADNSKNTAYLQMNSLKPEDTAVYYCAADVWYGSTWRNWGQGTLVTVSSGGGGSEPKSSDKTHTCPPCPAPELLGGPSVFLFPPKPKDTLMISRTPEVTCVVVDVSHEDPEVKFNWYVDGVEVHNAKTKPREEQYNSTYRVVSVLTVLHQDWLNGKEYKCKVSNKALPAPIEKTISKAKGQPREPQVYTLPPSREEMTKNQVSLTCLVKGFYPSDIAVEWESNGQPENNYKTTPPVLDSDGSFFLYSKLTVDKSRWQQGNVFSCSVMHEALHNHYTQKSLSLSPG

SEQ ID NO: 1827 - protein, 376 aa, Artificial Sequence
  Description of Artificial Sequence: Synthetic polypeptide
MKHLWFFLLLVAAPRWVLSEVQLVESGGGLVQPGGSLRLSCAASGSIFSINSMGWFRQAPGKEREFVAALSWIIGSTYYADSVKGRFTISADNSKNTAYLQMNSLKPEDTAVYYCAVNGRWRSWSSQRDWGQGTLVTVSSGGGGSEPKSSDKTHTCPPCPAPELLGGPSVFLFPPKPKDTLMISRTPEVTCVVVDVSHEDPEVKFNWYVDGVEVHNAKTKPREEQYNSTYRVVSVLTVLHQDWLNGKEYKCKVSNKALPAPIEKTISKAKGQPREPQVYTLPPSREEMTKNQVSLTCLVKGFYPSDIAVEWESNGQPENNYKTTPPVLDSDGSFFLYSKLTVDKSRWQQGNVFSCSVMHEALHNHYTQKSLSLSPG

SEQ ID NO: 1828 - protein, 373 aa, Artificial Sequence
  Description of Artificial Sequence: Synthetic polypeptide
MKHLWFFLLLVAAPRWVLSEVQLVESGGGLVQPGGSLRLSCAASGFTFDRSWMGWFRQAPGKERELVASITSGGSTSYADSVKGRFTISADNSKNTAYLQMNSLKPEDTAVYYCAADVWYGSTWRNWGQGTLVTVSSGGGGSEPKSSDKTHTCPPCPAPELLGGPSVFLFPPKPKDTLMISRTPEVTCVVVDVSHEDPEVKFNWYVDGVEVHNAKTKPREEQYNSTYRVVSVLTVLHQDWLNGKEYKCKVSNKALPAPIEKTISKAKGQPREPQVYTLPPSREEMTKNQVSLTCLVKGFYPSDIAVEWESNGQPENNYKTTPPVLDSDGSFFLYSKLTVDKSRWQQGNVFSCSVMHEALHNHYTQKSLSLSPG

SEQ ID NO: 1829 - protein, 373 aa, Artificial Sequence
  Description of Artificial Sequence: Synthetic polypeptide
MKHLWFFLLLVAAPRWVLSEVQLVESGGGLVQPGGSLRLSCAASGFTFSTSWMGWFRQAPGKERELVAGVNSNGYINYADSVKGRFTISADNSKNTAYLQMNSLKPEDTAVYYCAADVWYGSTWRNWGQGTLVTVSSGGGGSEPKSSDKTHTCPPCPAPELLGGPSVFLFPPKPKDTLMISRTPEVTCVVVDVSHEDPEVKFNWYVDGVEVHNAKTKPREEQYNSTYRVVSVLTVLHQDWLNGKEYKCKVSNKALPAPIEKTISKAKGQPREPQVYTLPPSREEMTKNQVSLTCLVKGFYPSDIAVEWESNGQPENNYKTTPPVLDSDGSFFLYSKLTVDKSRWQQGNVFSCSVMHEALHNHYTQKSLSLSPG

SEQ ID NO: 1830 - protein, 371 aa, Artificial Sequence
  Description of Artificial Sequence: Synthetic polypeptide
MKHLWFFLLLVAAPRWVLSEVQLVESGGGLVQPGGSLRLSCAASGSTLRDYVMGWFRQAPGKERELVSSISRSGTTMFADSVKGRFTIIADNSKNTAYLLMNSLKPQDTAVYYCAAVFSRGLLTCGQGTLVTVSSGGGGSEPKSSDKTHTCPPCPAPELLGGPSVFLFPPKPKDTLMISRTPEVTCVVVDVSHEDPEVKFNWYVDGVEVHNAKTKPREEQYNSTYRVVSVLTVLHQDWLNGKEYKCKVSNKALPAPIEKTISKAKGQPREPQVYTLPPSREEMTKNQVSLTCLVKGFYPSDIAVEWESNGQPENNYKTTPPVLDSDGSFFLYSKLTVDKSRWQQGNVFSCSVMHEALHNHYTQKSLSLSPG

SEQ ID NO: 1831 - protein, 376 aa, Artificial Sequence
  Description of Artificial Sequence: Synthetic polypeptide
MKHLWFFLLLVAAPRWVLSEVQLVESGGGLVQPGGSLRLSCAASGGTLSSYIMGWFRQAPGKEREFVAAISGWSGGTTNYADSVKGRFTISADNSKNTAYLQMNSLKPEDTAVYYCAAARFAPGSRGYDWGQGTLVTVSSGGGGSEPKSSDKTHTCPPCPAPELLGGPSVFLFPPKPKDTLMISRTPEVTCVVVDVSHEDPEVKFNWYVDGVEVHNAKTKPREEQYNSTYRVVSVLTVLHQDWLNGKEYKCKVSNKALPAPIEKTISKAKGQPREPQVYTLPPSREEMTKNQVSLTCLVKGFYPSDIAVEWESNGQPENNYKTTPPVLDSDGSFFLYSKLTVDKSRWQQGNVFSCSVMHEALHNHYTQKSLSLSPG

SEQ ID NO: 1832 - protein, 373 aa, Artificial Sequence
  Description of Artificial Sequence: Synthetic polypeptide
MKHLWFFLLLVAAPRWVLSEVQLVESGGGLVQPGGSLRLSCAASGFTFSTHWMGWFRQAPGKEREFVASIGSSGTTRYADSVKGRFTISADNSKNTAYLQMNSLKPEDTAVYYCAADVWYGSTWRNWGQGTLVTVSSGGGGSEPKSSDKTHTCPPCPAPELLGGPSVFLFPPKPKDTLMISRTPEVTCVVVDVSHEDPEVKFNWYVDGVEVHNAKTKPREEQYNSTYRVVSVLTVLHQDWLNGKEYKCKVSNKALPAPIEKTISKAKGQPREPQVYTLPPSREEMTKNQVSLTCLVKGFYPSDIAVEWESNGQPENNYKTTPPVLDSDGSFFLYSKLTVDKSRWQQGNVFSCSVMHEALHNHYTQKSLSLSPG

SEQ ID NO: 1833 - protein, 372 aa, Artificial Sequence
  Description of Artificial Sequence: Synthetic polypeptide
MKHLWFFLLLVAAPRWVLSEVQLVESGGGLVQPGGSLRLSCAASGGTFSAFPMGWFRQAPGKERELVAAISSGGTTYYADSVKGRFTISADNSKNTAYLQMNSLKPEDTAVYYCAAQGGVLSAWDWGQGTLLTVSSGGGGSEPKSSDKTHTCPPCPAPELLGGPSVFLFPPKPKDTLMISRTPEVTCVVVDVSHEDPEVKFNWYVDGVEVHNAKTKPREEQYNSTYRVVSVLTVLHQDWLNGKEYKCKVSNKALPAPIEKTISKAKGQPREPQVYTLPPSREEMTKNQVSLTCLVKGFYPSDIAVEWESNGQPENNYKTTPPVLDSDGSFFLYSKLTVDKSRWQQGNVFSCSVMHEALHNHYTQKSLSLSPG

SEQ ID NO: 1834 - protein, 373 aa, Artificial Sequence
  Description of Artificial Sequence: Synthetic polypeptide
MKHLWFFLLLVAAPRWVLSEVQLVESGGGLVQPGGSLRLSCAASGFTFSGNWMGWFRQAPGKEREWVASISSGGTTNYADSVKGRFTISADNSKNTAYLQMNSLKPEDTAVYYCAADVWYGSTWRNWGQGTLVTVSSGGGGSEPKSSDKTHTCPPCPAPELLGGPSVFLFPPKPKDTLMISRTPEVTCVVVDVSHEDPEVKFNWYVDGVEVHNAKTKPREEQYNSTYRVVSVLTVLHQDWLNGKEYKCKVSNKALPAPIEKTISKAKGQPREPQVYTLPPSREEMTKNQVSLTCLVKGFYPSDIAVEWESNGQPENNYKTTPPVLDSDGSFFLYSKLTVDKSRWQQGNVFSCSVMHEALHNHYTQKSLSLSPG

SEQ ID NO: 1835 - protein, 373 aa, Artificial Sequence
  Description of Artificial Sequence: Synthetic polypeptide
MKHLWFFLLLVAAPRWVLSEVQLVESGGGLVQPGGSLRLSCAASGFTFSGNWMGWFRQAPGKEREFVAGVNSNGYINYADSVKGRFTISADNSKNTAYLQMNSLKPEDTAVYYCAADVWYGSTWRNWGQGTLVTVSSGGGGSEPKSSDKTHTCPPCPAPELLGGPSVFLFPPKPKDTLMISRTPEVTCVVVDVSHEDPEVKFNWYVDGVEVHNAKTKPREEQYNSTYRVVSVLTVLHQDWLNGKEYKCKVSNKALPAPIEKTISKAKGQPREPQVYTLPPSREEMTKNQVSLTCLVKGFYPSDIAVEWESNGQPENNYKTTPPVLDSDGSFFLYSKLTVDKSRWQQGNVFSCSVMHEALHNHYTQKSLSLSPG

SEQ ID NO: 1836 - protein, 373 aa, Artificial Sequence
  Description of Artificial Sequence: Synthetic polypeptide
MKHLWFFLLLVAAPRWVLSEVQLVESGGGLVQPGGSLRLSCAASGFTFDRSWMGWFRQAPGKERELVASITSGGTTSYADSVKGRFTISADNSKNTAYLQMNSLKPEDTAVYYCAADVWYGSTWRNWGQGTLVTVSSGGGGSEPKSSDKTHTCPPCPAPELLGGPSVFLFPPKPKDTLMISRTPEVTCVVVDVSHEDPEVKFNWYVDGVEVHNAKTKPREEQYNSTYRVVSVLTVLHQDWLNGKEYKCKVSNKALPAPIEKTISKAKGQPREPQVYTLPPSREEMTKNQVSLTCLVKGFYPSDIAVEWESNGQPENNYKTTPPVLDSDGSFFLYSKLTVDKSRWQQGNVFSCSVMHEALHNHYTQKSLSLSPG

SEQ ID NO: 1837 - protein, 373 aa, Artificial Sequence
  Description of Artificial Sequence: Synthetic polypeptide
MKHLWFFLLLVAAPRWVLSEVQLVESGGGLVQPGGSLRLSCAASGFTFSGNWMGWFRQAPGKEREWVVGISSGGTPHYADSVKGRFTISADNSKNTAYLQMNSLKPEDTAVYYCAADVWYGSTWRNWGQGTLVTVSSGGGGSEPKSSDKTHTCPPCPAPELLGGPSVFLFPPKPKDTLMISRTPEVTCVVVDVSHEDPEVKFNWYVDGVEVHNAKTKPREEQYNSTYRVVSVLTVLHQDWLNGKEYKCKVSNKALPAPIEKTISKAKGQPREPQVYTLPPSREEMTKNQVSLTCLVKGFYPSDIAVEWESNGQPENNYKTTPPVLDSDGSFFLYSKLTVDKSRWQQGNVFSCSVMHEALHNHYTQKSLSLSPG

SEQ ID NO: 1838 - protein, 373 aa, Artificial Sequence
  Description of Artificial Sequence: Synthetic polypeptide
MKHLWFFLLLVAAPRWVLSEVQLVESGGGLVQPGGSLRLSCAASGFTLSSNWMGWFRQAPGKERELVAGVNSNGYINYADSVKGRFTISADNSKNTAYLQMNSLKPEDTAVYYCAADVWYGSTWRNWGQGTLVTVSSGGGGSEPKSSDKTHTCPPCPAPELLGGPSVFLFPPKPKDTLMISRTPEVTCVVVDVSHEDPEVKFNWYVDGVEVHNAKTKPREEQYNSTYRVVSVLTVLHQDWLNGKEYKCKVSNKALPAPIEKTISKAKGQPREPQVYTLPPSREEMTKNQVSLTCLVKGFYPSDIAVEWESNGQPENNYKTTPPVLDSDGSFFLYSKLTVDKSRWQQGNVFSCSVMHEALHNHYTQKSLSLSPG

SEQ ID NO: 1839 - protein, 373 aa, Artificial Sequence
  Description of Artificial Sequence: Synthetic polypeptide
MKHLWFFLLLVAAPRWVLSEVQLVESGGGLVQPGGSLRLSCAASGFDFSVSWMGWFRQAPGKERELVARISSGGELPYYADSVKGRFTISADNSKNTAYLQMNSLKPKHTAVYYCAARPNTRPGSMWGQGTLVTVSSGGGGSEPKSSDKTHTCPPCPAPELLGGPSVFLFPPKPKDTLMISRTPEVTCVVVDVSHEDPEVKFNWYVDGVEVHNAKTKPREEQYNSTYRVVSVLTVLHQDWLNGKEYKCKVSNKALPAPIEKTISKAKGQPREPQVYTLPPSREEMTKNQVSLTCLVKGFYPSDIAVEWESNGQPENNYKTTPPVLDSDGSFFLYSKLTVDKSRWQQGNVFSCSVMHEALHNHYTQKSLSLSPG

SEQ ID NO: 1840 - protein, 373 aa, Artificial Sequence
  Description of Artificial Sequence: Synthetic polypeptide
MKHLWFFLLLVAAPRWVLSEVQLVESGGGLVQPGGSLRLSCAASGFTMSSSWMGWFRQAPGKEREFVGGISSGGSTYYADSVKGRFTISADNSKNTAYLQMNSLKPEDTAVYYCAADVWYGSTWRNWGQGTLVTVSSGGGGSEPKSSDKTHTCPPCPAPELLGGPSVFLFPPKPKDTLMISRTPEVTCVVVDVSHEDPEVKFNWYVDGVEVHNAKTKPREEQYNSTYRVVSVLTVLHQDWLNGKEYKCKVSNKALPAPIEKTISKAKGQPREPQVYTLPPSREEMTKNQVSLTCLVKGFYPSDIAVEWESNGQPENNYKTTPPVLDSDGSFFLYSKLTVDKSRWQQGNVFSCSVMHEALHNHYTQKSLSLSPG

SEQ ID NO: 1841 - protein, 375 aa, Artificial Sequence
  Description of Artificial Sequence: Synthetic polypeptide
MKHLWFFLLLVAAPRWVLSEVQLVESGGGLVQPGGSLRLSCAASGRNFRRNSMGWFRQAPGKEREFVAVITRSGGGEVTTYADSVKGRFTISADNSKNTAYLQMNSLKPEDTAVYYCAMSSVTRGSSDWGQGTLVTVSSGGGGSEPKSSDKTHTCPPCPAPELLGGPSVFLFPPKPKDTLMISRTPEVTCVVVDVSHEDPEVKFNWYVDGVEVHNAKTKPREEQYNSTYRVVSVLTVLHQDWLNGKEYKCKVSNKALPAPIEKTISKAKGQPREPQVYTLPPSREEMTKNQVSLTCLVKGFYPSDIAVEWESNGQPENNYKTTPPVLDSDGSFFLYSKLTVDKSRWQQGNVFSCSVMHEALHNHYTQKSLSLSPG

SEQ ID NO: 1842 - protein, 373 aa, Artificial Sequence
  Description of Artificial Sequence: Synthetic polypeptide
MKHLWFFLLLVAAPRWVLSEVQLVESGGGLVQPGGSLRLSCAASGFTFDRSWMGWFRQAPGKEREFVAGITSSGIPNYADSVKGRFTISADNSKNTAYLQMNSLKPEDTAVYYCAADVWYGSTWRNWGQGTLVTVSSGGGGSEPKSSDKTHTCPPCPAPELLGGPSVFLFPPKPKDTLMISRTPEVTCVVVDVSHEDPEVKFNWYVDGVEVHNAKTKPREEQYNSTYRVVSVLTVLHQDWLNGKEYKCKVSNKALPAPIEKTISKAKGQPREPQVYTLPPSREEMTKNQVSLTCLVKGFYPSDIAVEWESNGQPENNYKTTPPVLDSDGSFFLYSKLTVDKSRWQQGNVFSCSVMHEALHNHYTQKSLSLSPG

SEQ ID NO: 1843 - protein, 371 aa, Artificial Sequence
  Description of Artificial Sequence: Synthetic polypeptide
MKHLWFFLLLVAAPRWVLSEVQLVESGGGLVQPGGSLRLSCAASGLTISTYNMGWFRQAPGKERELVSAIGWSGASTYYADSVKGRFTISADNSKNTAYLQMNSLKPEDTAVYYCAAFRGRMYDWGQGTLVTVSSGGGGSEPKSSDKTHTCPPCPAPELLGGPSVFLFPPKPKDTLMISRTPEVTCVVVDVSHEDPEVKFNWYVDGVEVHNAKTKPREEQYNSTYRVVSVLTVLHQDWLNGKEYKCKVSNKALPAPIEKTISKAKGQPREPQVYTLPPSREEMTKNQVSLTCLVKGFYPSDIAVEWESNGQPENNYKTTPPVLDSDGSFFLYSKLTVDKSRWQQGNVFSCSVMHEALHNHYTQKSLSLSPG

SEQ ID NO: 1844 - protein, 373 aa, Artificial Sequence
  Description of Artificial Sequence: Synthetic polypeptide
MKHLWFFLLLVAAPRWVLSEVQLVESGGGLVQPGGSLRLSCAASGFTFSTSWMGWFRQAPGKERELVAAVTSGGNTNYADSVKGRFTISADNSKNTAYLQMNSLKPEDTAVYYCAADVWYGSTWRNWGQGTLVTVSSGGGGSEPKSSDKTHTCPPCPAPELLGGPSVFLFPPKPKDTLMISRTPEVTCVVVDVSHEDPEVKFNWYVDGVEVHNAKTKPREEQYNSTYRVVSVLTVLHQDWLNGKEYKCKVSNKALPAPIEKTISKAKGQPREPQVYTLPPSREEMTKNQVSLTCLVKGFYPSDIAVEWESNGQPENNYKTTPPVLDSDGSFFLYSKLTVDKSRWQQGNVFSCSVMHEALHNHYTQKSLSLSPG

SEQ ID NO: 1845 - protein, 371 aa, Artificial Sequence
  Description of Artificial Sequence: Synthetic polypeptide
MKHLWFFLLLVAAPRWVLSEVQLVESGGGLVQPGGSLRLSCAASGRTFGDYIMGWFRQAPGKERELVAEITRVGNTNYADSVKGRFTISADNSKNTAYLQMNSLKPEDTAVYYCAAVFSRGPLTWGQGTLVTVSSGGGGSEPKSSDKTHTCPPCPAPELLGGPSVFLFPPKPKDTLMISRTPEVTCVVVDVSHEDPEVKFNWYVDGVEVHNAKTKPREEQYNSTYRVVSVLTVLHQDWLNGKEYKCKVSNKALPAPIEKTISKAKGQPREPQVYTLPPSREEMTKNQVSLTCLVKGFYPSDIAVEWESNGQPENNYKTTPPVLDSDGSFFLYSKLTVDKSRWQQGNVFSCSVMHEALHNHYTQKSLSLSPG

SEQ ID NO: 1846 - protein, 375 aa, Artificial Sequence
  Description of Artificial Sequence: Synthetic polypeptide
MKHLWFFLLLVAAPRWVLSEVQLVESGGGLVQPGGSLRLSCAASGRIFRRNSMGWFRQAPGKEREFVAVITRSGGGEVTTYADSVKGRFTINADNSKNTAYLQMNSLKPEDTAVYYCAMSSVTRGSSDWGQGTLVTVSTGGGGSEPKSSDKTHTCPPCPAPELLGGPSVFLFPPKPKDTLMISRTPEVTCVVVDVSHEDPEVKFNWYVDGVEVHNAKTKPREEQYNSTYRVVSVLTVLHQDWLNGKEYKCKVSNKALPAPIEKTISKAKGQPREPQVYTLPPSREEMTKNQVSLTCLVKGFYPSDIAVEWESNGQPENNYKTTPPVLDSDGSFFLYSKLTVDKSRWQQGNVFSCSVMHEALHNHYTQKSLSLSPG

SEQ ID NO: 1847 - protein, 9 aa, Artificial Sequence
  Description of Artificial Sequence: Synthetic peptide
FTFSNYGVS

SEQ ID NO: 1848 - protein, 9 aa, Artificial Sequence
  Description of Artificial Sequence: Synthetic peptide
FTFVRYDMA

SEQ ID NO: 1849 - protein, 9 aa, Artificial Sequence
  Description of Artificial Sequence: Synthetic peptide
FTFSKYGMS

SEQ ID NO: 1850 - protein, 9 aa, Artificial Sequence
  Description of Artificial Sequence: Synthetic peptide
FTFSRYFMG

SEQ ID NO: 1851 - protein, 9 aa, Artificial Sequence
  Description of Artificial Sequence: Synthetic peptide
FTFHKYGMT

SEQ ID NO: 1852 - protein, 9 aa, Artificial Sequence
  Description of Artificial Sequence: Synthetic peptide
FTFSRYVMG

SEQ ID NO: 1853 - protein, 9 aa, Artificial Sequence
  Description of Artificial Sequence: Synthetic peptide
FTFSTYAMN

SEQ ID NO: 1854 - protein, 9 aa, Artificial Sequence
  Description of Artificial Sequence: Synthetic peptide
CTFSSYLMS

SEQ ID NO: 1855 - protein, 9 aa, Artificial Sequence
  Description of Artificial Sequence: Synthetic peptide
FTFNAYPMT

SEQ ID NO: 1856 - protein, 9 aa, Artificial Sequence
  Description of Artificial Sequence: Synthetic peptide
FTFHKYGMA

SEQ ID NO: 1857 - protein, 9 aa, Artificial Sequence
  Description of Artificial Sequence: Synthetic peptide
FTFHKYGMA

SEQ ID NO: 1858 - protein, 9 aa, Artificial Sequence
  Description of Artificial Sequence: Synthetic peptide
FTFSPYSMS

SEQ ID NO: 1859 - protein, 9 aa, Artificial Sequence
  Description of Artificial Sequence: Synthetic peptide
FTFSRYFMG

SEQ ID NO: 1860 - protein, 9 aa, Artificial Sequence
  Description of Artificial Sequence: Synthetic peptide
FTFSSYFMS

SEQ ID NO: 1861 - protein, 9 aa, Artificial Sequence
  Description of Artificial Sequence: Synthetic peptide
FTFSRYIMG

SEQ ID NO: 1862 - protein, 9 aa, Artificial Sequence
  Description of Artificial Sequence: Synthetic peptide
FTFSNYGVS

SEQ ID NO: 1863 - protein, 9 aa, Artificial Sequence
  Description of Artificial Sequence: Synthetic peptide
FTFSRYAMN

SEQ ID NO: 1864 - protein, 9 aa, Artificial Sequence
  Description of Artificial Sequence: Synthetic peptide
FTFSRYFMG

SEQ ID NO: 1865 - protein, 9 aa, Artificial Sequence
  Description of Artificial Sequence: Synthetic peptide
FTFHKYGMA

SEQ ID NO: 1866 - protein, 9 aa, Artificial Sequence
  Description of Artificial Sequence: Synthetic peptide
FTFSKYGVS

SEQ ID NO: 1867 - protein, 9 aa, Artificial Sequence
  Description of Artificial Sequence: Synthetic peptide
FTFSSYFMS

SEQ ID NO: 1868 - protein, 9 aa, Artificial Sequence
  Description of Artificial Sequence: Synthetic peptide
FTFSSYLMS

SEQ ID NO: 1869 - protein, 9 aa, Artificial Sequence
  Description of Artificial Sequence: Synthetic peptide
FTFSRYVMN

SEQ ID NO: 1870 - protein, 9 aa, Artificial Sequence
  Description of Artificial Sequence: Synthetic peptide
FTFSNYGVS

SEQ ID NO: 1871 - protein, 9 aa, Artificial Sequence
  Description of Artificial Sequence: Synthetic peptide
FTFEDETMS

SEQ ID NO: 1872 - protein, 9 aa, Artificial Sequence
  Description of Artificial Sequence: Synthetic peptide
FTFSNYGVS

SEQ ID NO: 1873 - protein, 9 aa, Artificial Sequence
  Description of Artificial Sequence: Synthetic peptide
FTFSNYGVS

SEQ ID NO: 1874 - protein, 9 aa, Artificial Sequence
  Description of Artificial Sequence: Synthetic peptide
FTFSNYGVS

SEQ ID NO: 1875 - protein, 9 aa, Artificial Sequence
  Description of Artificial Sequence: Synthetic peptide
FTFSNYGVS

SEQ ID NO: 1876 - protein, 9 aa, Artificial Sequence
  Description of Artificial Sequence: Synthetic peptide
FTFNAYPMT

SEQ ID NO: 1877 - protein, 9 aa, Artificial Sequence
  Description of Artificial Sequence: Synthetic peptide
FTFEHNDMH

SEQ ID NO: 1878 - protein, 9 aa, Artificial Sequence
  Description of Artificial Sequence: Synthetic peptide
LHSRSYVMG

SEQ ID NO: 1879 - protein, 9 aa, Artificial Sequence
  Description of Artificial Sequence: Synthetic peptide
FTFDKYDMA

SEQ ID NO: 1880 - protein, 9 aa, Artificial Sequence
  Description of Artificial Sequence: Synthetic peptide
FTFNKYPMM

SEQ ID NO: 1881 - protein, 9 aa, Artificial Sequence
  Description of Artificial Sequence: Synthetic peptide
FTFSRYAMN

SEQ ID NO: 1882 - protein, 9 aa, Artificial Sequence
  Description of Artificial Sequence: Synthetic peptide
FTFNADPMS

SEQ ID NO: 1883 - protein, 9 aa, Artificial Sequence
  Description of Artificial Sequence: Synthetic peptide
FTFEVYTMA

SEQ ID NO: 1884 - protein, 9 aa, Artificial Sequence
  Description of Artificial Sequence: Synthetic peptide
FTFHKYGMT

SEQ ID NO: 1885 - protein, 9 aa, Artificial Sequence
  Description of Artificial Sequence: Synthetic peptide
FTFNKYPMM

SEQ ID NO: 1886 - protein, 9 aa, Artificial Sequence
  Description of Artificial Sequence: Synthetic peptide
SSVSRYVMG

SEQ ID NO: 1887 - protein, 9 aa, Artificial Sequence
  Description of Artificial Sequence: Synthetic peptide
FTFPVYNMA

SEQ ID NO: 1888 - protein, 9 aa, Artificial Sequence
  Description of Artificial Sequence: Synthetic peptide
FTFSSYFMS

SEQ ID NO: 1889 - protein, 9 aa, Artificial Sequence
  Description of Artificial Sequence: Synthetic peptide
FTFSRYFMG

SEQ ID NO: 1890 - protein, 9 aa, Artificial Sequence
  Description of Artificial Sequence: Synthetic peptide
FTFEPVIMG

SEQ ID NO: 1891 - protein, 9 aa, Artificial Sequence
  Description of Artificial Sequence: Synthetic peptide
FTFHKYGMA

SEQ ID NO: 1892 - protein, 9 aa, Artificial Sequence
  Description of Artificial Sequence: Synthetic peptide
FTFEPVIMG

SEQ ID NO: 1893 - protein, 9 aa, Artificial Sequence
  Description of Artificial Sequence: Synthetic peptide
FTFHKYGMA

SEQ ID NO: 1894 - protein, 9 aa, Artificial Sequence
  Description of Artificial Sequence: Synthetic peptide
FTFHKYGMA

SEQ ID NO: 1895 - protein, 9 aa, Artificial Sequence
  Description of Artificial Sequence: Synthetic peptide
FTFSNYGVS

SEQ ID NO: 1896 - protein, 13 aa, Artificial Sequence
  Description of Artificial Sequence: Synthetic peptide
GYINPSRGYTYYA

SEQ ID NO: 1897 - protein, 13 aa, Artificial Sequence
  Description of Artificial Sequence: Synthetic peptide
STISSGGDYTYYP

SEQ ID NO: 1898 - protein, 13 aa, Artificial Sequence
  Description of Artificial Sequence: Synthetic peptide
SYINSSRGYTYYA

SEQ ID NO: 1899 - protein, 13 aa, Artificial Sequence
  Description of Artificial Sequence: Synthetic peptide
SEISPSGKKKYYA

SEQ ID NO: 1900 - protein, 13 aa, Artificial Sequence
  Description of Artificial Sequence: Synthetic peptide
SAISSGGGYTYYP

SEQ ID NO: 1901 - protein, 13 aa, Artificial Sequence
  Description of Artificial Sequence: Synthetic peptide
SEISPSGKKKYYA

SEQ ID NO: 1902 - protein, 13 aa, Artificial Sequence
  Description of Artificial Sequence: Synthetic peptide
TEISPSGKKKYYA

SEQ ID NO: 1903 - protein, 12 aa, Artificial Sequence
  Description of Artificial Sequence: Synthetic peptide
GVIWGGGGTYYA

SEQ ID NO: 1904 - protein, 13 aa, Artificial Sequence
  Description of Artificial Sequence: Synthetic peptide
SGITGSGGSTYYA

SEQ ID NO: 1905 - protein, 13 aa, Artificial Sequence
  Description of Artificial Sequence: Synthetic peptide
STISSGGGYTYYP

SEQ ID NO: 1906 - protein, 13 aa, Artificial Sequence
  Description of Artificial Sequence: Synthetic peptide
STISSGGGYTYYP

SEQ ID NO: 1907 - protein, 13 aa, Artificial Sequence
  Description of Artificial Sequence: Synthetic peptide
SEISPSGKKKYYA

SEQ ID NO: 1908 - protein, 13 aa, Artificial Sequence
  Description of Artificial Sequence: Synthetic peptide
SEISPSGKKKYYA

SEQ ID NO: 1909 - protein, 12 aa, Artificial Sequence
  Description of Artificial Sequence: Synthetic peptide
GVIWGGGGTYYA

SEQ ID NO: 1910 - protein, 13 aa, Artificial Sequence
  Description of Artificial Sequence: Synthetic peptide
SEISLIGKKKYYA

SEQ ID NO: 1911 - protein, 13 aa, Artificial Sequence
  Description of Artificial Sequence: Synthetic peptide
GYINRSREYTYYA

SEQ ID NO: 1912 - protein, 13 aa, Artificial Sequence
  Description of Artificial Sequence: Synthetic peptide
SEISPSGKKKYYA

SEQ ID NO: 1913 - protein, 13 aa, Artificial Sequence
  Description of Artificial Sequence: Synthetic peptide
SEISPSGKKKYYA

SEQ ID NO: 1914 - protein, 13 aa, Artificial Sequence
  Description of Artificial Sequence: Synthetic peptide
STISGGGGYTYYP

SEQ ID NO: 1915 - protein, 13 aa, Artificial Sequence
  Description of Artificial Sequence: Synthetic peptide
CYINSGSGYTYYA

SEQ ID NO: 1916 - protein, 12 aa, Artificial Sequence
  Description of Artificial Sequence: Synthetic peptide
GVIWGGGGTYYA

SEQ ID NO: 1917 - protein, 12 aa, Artificial Sequence
  Description of Artificial Sequence: Synthetic peptide
GVIWGGGGTYYA

SEQ ID NO: 1918 - protein, 13 aa, Artificial Sequence
  Description of Artificial Sequence: Synthetic peptide
SEISPSGKKKYYA

SEQ ID NO: 1919 - protein, 13 aa, Artificial Sequence
  Description of Artificial Sequence: Synthetic peptide
GYINPSRGYTYYA

SEQ ID NO: 1920 - protein, 13 aa, Artificial Sequence
  Description of Artificial Sequence: Synthetic peptide
SAISGSGGGTSYA

SEQ ID NO: 1921 - protein, 13 aa, Artificial Sequence
  Description of Artificial Sequence: Synthetic peptide
SWISPHGALTYYA

SEQ ID NO: 1922 - protein, 13 aa, Artificial Sequence
  Description of Artificial Sequence: Synthetic peptide
SSIDWHGWVTYYA

SEQ ID NO: 1923 - protein, 13 aa, Artificial Sequence
  Description of Artificial Sequence: Synthetic peptide
VYINPSRGYTYYA

SEQ ID NO: 1924 - protein, 13 aa, Artificial Sequence
  Description of Artificial Sequence: Synthetic peptide
SWISPHGALTYYA

SEQ ID NO: 1925 - protein, 13 aa, Artificial Sequence
  Description of Artificial Sequence: Synthetic peptide
SAITGSGGSTYYA

SEQ ID NO: 1926 - protein, 13 aa, Artificial Sequence
  Description of Artificial Sequence: Synthetic peptide
SGISPSGGITTYA

SEQ ID NO: 1927 - protein, 13 aa, Artificial Sequence
  Description of Artificial Sequence: Synthetic peptide
SEISRSGKKKYYA

SEQ ID NO: 1928 - protein, 13 aa, Artificial Sequence
  Description of Artificial Sequence: Synthetic peptide
STICSGGDYTYYP

SEQ ID NO: 1929 - protein, 13 aa, Artificial Sequence
  Description of Artificial Sequence: Synthetic peptide
STIGPSGTSTYYA

SEQ ID NO: 1930 - protein, 13 aa, Artificial Sequence
  Description of Artificial Sequence: Synthetic peptide
SEISPSGKKKYYA

SEQ ID NO: 1931 - protein, 13 aa, Artificial Sequence
  Description of Artificial Sequence: Synthetic peptide
SAITGSGGSTYYA

SEQ ID NO: 1932 - protein, 13 aa, Artificial Sequence
  Description of Artificial Sequence: Synthetic peptide
SSIHPKGYPTRYA

SEQ ID NO: 1933 - protein, 13 aa, Artificial Sequence
  Description of Artificial Sequence: Synthetic peptide
SSISSGGGYTYYP

SEQ ID NO: 1934 - protein, 12 aa, Artificial Sequence
  Description of Artificial Sequence: Synthetic peptide
SGITRSGSTNYR

SEQ ID NO: 1935 - protein, 13 aa, Artificial Sequence
  Description of Artificial Sequence: Synthetic peptide
SEISRIGKKKCYA

SEQ ID NO: 1936 - protein, 13 aa, Artificial Sequence
  Description of Artificial Sequence: Synthetic peptide
SGIYPSGGSTVYA

SEQ ID NO: 1937 - protein, 12 aa, Artificial Sequence
  Description of Artificial Sequence: Synthetic peptide
GVIWGGGGTYYA

SEQ ID NO: 1938 - protein, 13 aa, Artificial Sequence
  Description of Artificial Sequence: Synthetic peptide
SEISPSGKKKYYA

SEQ ID NO: 1939 - protein, 13 aa, Artificial Sequence
  Description of Artificial Sequence: Synthetic peptide
SSISPNGWDTYYA

SEQ ID NO: 1940 - protein, 13 aa, Artificial Sequence
  Description of Artificial Sequence: Synthetic peptide
STISSGGGYTYYP

SEQ ID NO: 1941 - protein, 13 aa, Artificial Sequence
  Description of Artificial Sequence: Synthetic peptide
SSISPNGWDTYYA

SEQ ID NO: 1942 - protein, 13 aa, Artificial Sequence
  Description of Artificial Sequence: Synthetic peptide
STISSGGGYTYYP

SEQ ID NO: 1943 - protein, 13 aa, Artificial Sequence
  Description of Artificial Sequence: Synthetic peptide
STISSGGGYTYYP

SEQ ID NO: 1944 - protein, 13 aa, Artificial Sequence
  Description of Artificial Sequence: Synthetic peptide
GYINPSRGYTYYA

SEQ ID NO: 1945 - protein, 12 aa, Artificial Sequence
  Description of Artificial Sequence: Synthetic peptide
CARSYGGGFDYW

SEQ ID NO: 1946 - protein, 12 aa, Artificial Sequence
  Description of Artificial Sequence: Synthetic peptide
CAKDTYNHFDYW

SEQ ID NO: 1947 - protein, 12 aa, Artificial Sequence
  Description of Artificial Sequence: Synthetic peptide
CARSSGGGFDYW

SEQ ID NO: 1948 - protein, 14 aa, Artificial Sequence
  Description of Artificial Sequence: Synthetic peptide
CAKSSFDKYNFDYW

SEQ ID NO: 1949 - protein, 12 aa, Artificial Sequence
  Description of Artificial Sequence: Synthetic peptide
CARDTYLHFDYW

SEQ ID NO: 1950 - protein, 14 aa, Artificial Sequence
  Description of Artificial Sequence: Synthetic peptide
CAKSSFDKYNFDYW

SEQ ID NO: 1951 - protein, 14 aa, Artificial Sequence
  Description of Artificial Sequence: Synthetic peptide
CAKSSFDKYNFDYW

SEQ ID NO: 1952 - protein, 11 aa, Artificial Sequence
  Description of Artificial Sequence: Synthetic peptide
CAKGGTSFDYW

SEQ ID NO: 1953 - protein, 15 aa, Artificial Sequence
  Description of Artificial Sequence: Synthetic peptide
CARDGSYSSSWYGYW

SEQ ID NO: 1954 - protein, 12 aa, Artificial Sequence
  Description of Artificial Sequence: Synthetic peptide
CARDTYLHFEYW

SEQ ID NO: 1955 - protein, 12 aa, Artificial Sequence
  Description of Artificial Sequence: Synthetic peptide
CARDTYLHFDYW

SEQ ID NO: 1956 - protein, 14 aa, Artificial Sequence
  Description of Artificial Sequence: Synthetic peptide
CARSSFDKYNFDYW

SEQ ID NO: 1957 - protein, 14 aa, Artificial Sequence
  Description of Artificial Sequence: Synthetic peptide
CAKSSFDKYNFDYW

SEQ ID NO: 1958 - protein, 11 aa, Artificial Sequence
  Description of Artificial Sequence: Synthetic peptide
CAKGGTSFDYW

SEQ ID NO: 1959 - protein, 14 aa, Artificial Sequence
  Description of Artificial Sequence: Synthetic peptide
CAKSSFDKYNFDYW

SEQ ID NO: 1960 - protein, 12 aa, Artificial Sequence
  Description of Artificial Sequence: Synthetic peptide
CARSYGGGFDYW

SEQ ID NO: 1961 - protein, 14 aa, Artificial Sequence
  Description of Artificial Sequence: Synthetic peptide
CAKSSFDKYNFDYW

SEQ ID NO: 1962 - protein, 14 aa, Artificial Sequence
  Description of Artificial Sequence: Synthetic peptide
CAKSSFDKYNFDYW

SEQ ID NO: 1963 - protein, 12 aa, Artificial Sequence
  Description of Artificial Sequence: Synthetic peptide
CARDTYLHFDYW

SEQ ID NO: 1964 - protein, 12 aa, Artificial Sequence
  Description of Artificial Sequence: Synthetic peptide
CARASYVHFDYW

SEQ ID NO: 1965 - protein, 11 aa, Artificial Sequence
  Description of Artificial Sequence: Synthetic peptide
CAKGGTSFDYW

SEQ ID NO: 1966 - protein, 11 aa, Artificial Sequence
  Description of Artificial Sequence: Synthetic peptide
CAKGGTSFDYW

SEQ ID NO: 1967 - protein, 14 aa, Artificial Sequence
  Description of Artificial Sequence: Synthetic peptide
CAKSSFDKYNFDYW

SEQ ID NO: 1968 - protein, 12 aa, Artificial Sequence
  Description of Artificial Sequence: Synthetic peptide
CARSYGGGFDYW

SEQ ID NO: 1969 - protein, 13 aa, Artificial Sequence
  Description of Artificial Sequence: Synthetic peptide
CARDVIAGPFDYW

SEQ ID NO: 1970 - protein, 11 aa, Artificial Sequence
  Description of Artificial Sequence: Synthetic peptide
CAKGRRRFDYW

SEQ ID NO: 1971 - protein, 11 aa, Artificial Sequence
  Description of Artificial Sequence: Synthetic peptide
CVKNALRFDYW

SEQ ID NO: 1972 - protein, 12 aa, Artificial Sequence
  Description of Artificial Sequence: Synthetic peptide
CARSYGGGFDYW

SEQ ID NO: 1973 - protein, 11 aa, Artificial Sequence
  Description of Artificial Sequence: Synthetic peptide
CAKGRRRFDYW

SEQ ID NO: 1974 - protein, 12 aa, Artificial Sequence
  Description of Artificial Sequence: Synthetic peptide
CARVWRNHLDYW

SEQ ID NO: 1975 - protein, 19 aa, Artificial Sequence
  Description of Artificial Sequence: Synthetic peptide
CAKQAPGEKWLARGRLDYW

SEQ ID NO: 1976 - protein, 14 aa, Artificial Sequence
  Description of Artificial Sequence: Synthetic peptide
CAKSSFGEYNFDYW

SEQ ID NO: 1977 - protein, 12 aa, Artificial Sequence
  Description of Artificial Sequence: Synthetic peptide
CARDTYIHFDYW

SEQ ID NO: 1978 - protein, 13 aa, Artificial Sequence
  Description of Artificial Sequence: Synthetic peptide
CARRSYFRRFDYW

SEQ ID NO: 1979 - protein, 14 aa, Artificial Sequence
  Description of Artificial Sequence: Synthetic peptide
CAKSSFDKYNFDYW

SEQ ID NO: 1980 - protein, 15 aa, Artificial Sequence
  Description of Artificial Sequence: Synthetic peptide
CARDGSYSSSWYGYW

SEQ ID NO: 1981 - protein, 12 aa, Artificial Sequence
  Description of Artificial Sequence: Synthetic peptide
CAKGWFGNFDYW

SEQ ID NO: 1982 - protein, 12 aa, Artificial Sequence
  Description of Artificial Sequence: Synthetic peptide
CARDTYLHFDYW

SEQ ID NO: 1983 - protein, 12 aa, Artificial Sequence
  Description of Artificial Sequence: Synthetic peptide
CAKKLSNGFDYW

SEQ ID NO: 1984 - protein, 14 aa, Artificial Sequence
  Description of Artificial Sequence: Synthetic peptide
CEKSSFDKYNFDYW

SEQ ID NO: 1985 - protein, 16 aa, Artificial Sequence
  Description of Artificial Sequence: Synthetic peptide
CARHRAGSSGWYSDYW

SEQ ID NO: 1986 - protein, 11 aa, Artificial Sequence
  Description of Artificial Sequence: Synthetic peptide
CAKGGTSFDYW

SEQ ID NO: 1987 - protein, 14 aa, Artificial Sequence
  Description of Artificial Sequence: Synthetic peptide
CAKSSFDKYNFHYW

SEQ ID NO: 1988 - protein, 11 aa, Artificial Sequence
  Description of Artificial Sequence: Synthetic peptide
CATETSPNDYW

SEQ ID NO: 1989 - protein, 12 aa, Artificial Sequence
  Description of Artificial Sequence: Synthetic peptide
CARDTYLHFDYW

SEQ ID NO: 1990 - protein, 11 aa, Artificial Sequence
  Description of Artificial Sequence: Synthetic peptide
CATETSPNDYW

SEQ ID NO: 1991 - protein, 12 aa, Artificial Sequence
  Description of Artificial Sequence: Synthetic peptide
CARDTYLHFDYW

SEQ ID NO: 1992 - protein, 12 aa, Artificial Sequence
  Description of Artificial Sequence: Synthetic peptide
CARDTYLHFDYW

SEQ ID NO: 1993 - protein, 12 aa, Artificial Sequence
  Description of Artificial Sequence: Synthetic peptide
CARSYGGGFDYW

SEQ ID NO: 1994 - protein, 11 aa, Artificial Sequence
  Description of Artificial Sequence: Synthetic peptide
RASQTIERRLN

SEQ ID NO: 1995 - protein, 11 aa, Artificial Sequence
  Description of Artificial Sequence: Synthetic peptide
RASHGVRTSLA

SEQ ID NO: 1996 - protein, 11 aa, Artificial Sequence
  Description of Artificial Sequence: Synthetic peptide
RATQAIERRLK

SEQ ID NO: 1997 - protein, 11 aa, Artificial Sequence
  Description of Artificial Sequence: Synthetic peptide
SASQDINKYLN

SEQ ID NO: 1998 - protein, 11 aa, Artificial Sequence
  Description of Artificial Sequence: Synthetic peptide
RASQGVRTSLA

SEQ ID NO: 1999 - protein, 11 aa, Artificial Sequence
  Description of Artificial Sequence: Synthetic peptide
SASHDINEYLN

SEQ ID NO: 2000 - protein, 11 aa, Artificial Sequence
  Description of Artificial Sequence: Synthetic peptide
RPAHNIGNFLN

SEQ ID NO: 2001 - protein, 11 aa, Artificial Sequence
  Description of Artificial Sequence: Synthetic peptide
RASQNIRSYLN

SEQ ID NO: 2002 - protein, 11 aa, Artificial Sequence
  Description of Artificial Sequence: Synthetic peptide
SGNKLGDKYAS

SEQ ID NO: 2003 - protein, 11 aa, Artificial Sequence
  Description of Artificial Sequence: Synthetic peptide
RASQGVRTSLA

SEQ ID NO: 2004 - protein, 11 aa, Artificial Sequence
  Description of Artificial Sequence: Synthetic peptide
RASQGVRTSLA

SEQ ID NO: 2005 - protein, 11 aa, Artificial Sequence
  Description of Artificial Sequence: Synthetic peptide
SASQDIRRYLN

SEQ ID NO: 2006 - protein, 11 aa, Artificial Sequence
  Description of Artificial Sequence: Synthetic peptide
SASQDINKYLN

SEQ ID NO: 2007 - protein, 11 aa, Artificial Sequence
  Description of Artificial Sequence: Synthetic peptide
RASQNIRSYLN

SEQ ID NO: 2008 - protein, 11 aa, Artificial Sequence
  Description of Artificial Sequence: Synthetic peptide
SAYQDINKYLN

SEQ ID NO: 2009 - protein, 11 aa, Artificial Sequence
  Description of Artificial Sequence: Synthetic peptide
RASQTIERRLN

SEQ ID NO: 2010 - protein, 11 aa, Artificial Sequence
  Description of Artificial Sequence: Synthetic peptide
RASQDIGNFLN

SEQ ID NO: 2011 - protein, 11 aa, Artificial Sequence
  Description of Artificial Sequence: Synthetic peptide
RASQSISSYVN

SEQ ID NO: 2012 - protein, 11 aa, Artificial Sequence
  Description of Artificial Sequence: Synthetic peptide
RASQVVSTSLS

SEQ ID NO: 2013 - protein, 11 aa, Artificial Sequence
  Description of Artificial Sequence: Synthetic peptide
RATQTIETSLK

SEQ ID NO: 2014 - protein, 11 aa, Artificial Sequence
  Description of Artificial Sequence: Synthetic peptide
RASQNIRSYLN

SEQ ID NO: 2015 - protein, 11 aa, Artificial Sequence
  Description of Artificial Sequence: Synthetic peptide
RASQNIRSYLN

SEQ ID NO: 2016 - protein, 11 aa, Artificial Sequence
  Description of Artificial Sequence: Synthetic peptide
CASQDINKFLN

SEQ ID NO: 2017 - protein, 11 aa, Artificial Sequence
  Description of Artificial Sequence: Synthetic peptide
RASQTIERRLN

SEQ ID NO: 2018 - protein, 13 aa, Artificial Sequence
  Description of Artificial Sequence: Synthetic peptide
AASGFNIKDTYIH

SEQ ID NO: 2019 - protein, 11 aa, Artificial Sequence
  Description of Artificial Sequence: Synthetic peptide
RASQTISSYLN

SEQ ID NO: 2020 - protein, 11 aa, Artificial Sequence
  Description of Artificial Sequence: Synthetic peptide
SASQDINKYLN

SEQ ID NO: 2021 - protein, 11 aa, Artificial Sequence
  Description of Artificial Sequence: Synthetic peptide
RASQTIERRLN

SEQ ID NO: 2022 - protein, 11 aa, Artificial Sequence
  Description of Artificial Sequence: Synthetic peptide
RASQTISSYLN

SEQ ID NO: 2023 - protein, 11 aa, Artificial Sequence
  Description of Artificial Sequence: Synthetic peptide
SGDKLGHTYTS

SEQ ID NO: 2024 - protein, 11 aa, Artificial Sequence
  Description of Artificial Sequence: Synthetic peptide
RANQNIGNFLN

SEQ ID NO: 2025 - protein, 11 aa, Artificial Sequence
  Description of Artificial Sequence: Synthetic peptide
SASQDINKYLN

SEQ ID NO: 2026 - protein, 11 aa, Artificial Sequence
  Description of Artificial Sequence: Synthetic peptide
RASHGVRTSLA

SEQ ID NO: 2027 - protein, 11 aa, Artificial Sequence
  Description of Artificial Sequence: Synthetic peptide
RATQSIRSFLN

SEQ ID NO: 2028 - protein, 11 aa, Artificial Sequence
  Description of Artificial Sequence: Synthetic peptide
RASQDIGNFLN

SEQ ID NO: 2029 - protein, 11 aa, Artificial Sequence
  Description of Artificial Sequence: Synthetic peptide
SGNKLGDKYAS

SEQ ID NO: 2030 - protein, 11 aa, Artificial Sequence
  Description of Artificial Sequence: Synthetic peptide
RASQGVRTSLA

SEQ ID NO: 2031 - protein, 11 aa, Artificial Sequence
  Description of Artificial Sequence: Synthetic peptide
RASQGVRTSLA

SEQ ID NO: 2032 - protein, 11 aa, Artificial Sequence
  Description of Artificial Sequence: Synthetic peptide
RASQRISSFLN

SEQ ID NO: 2033 - protein, 11 aa, Artificial Sequence
  Description of Artificial Sequence: Synthetic peptide
CASQDINKYLN

SEQ ID NO: 2034 - protein, 11 aa, Artificial Sequence
  Description of Artificial Sequence: Synthetic peptide
RASQSVDRYFN

SEQ ID NO: 2035 - protein, 11 aa, Artificial Sequence
  Description of Artificial Sequence: Synthetic peptide
RASQNIRSYLN

SEQ ID NO: 2036 - protein, 11 aa, Artificial Sequence
  Description of Artificial Sequence: Synthetic peptide
SASQDINKYLN

SEQ ID NO: 2037 - protein, 16 aa, Artificial Sequence
  Description of Artificial Sequence: Synthetic peptide
RSSQSLVHSTGNTYLH

SEQ ID NO: 2038 - protein, 11 aa, Artificial Sequence
  Description of Artificial Sequence: Synthetic peptide
RASQGVRTSLA

SEQ ID NO: 2039 - protein, 16 aa, Artificial Sequence
  Description of Artificial Sequence: Synthetic peptide
RSSQSLVHSTGNTYLH

SEQ ID NO: 2040 - protein, 11 aa, Artificial Sequence
  Description of Artificial Sequence: Synthetic peptide
RASQGVRTSLA

SEQ ID NO: 2041 - protein, 11 aa, Artificial Sequence
  Description of Artificial Sequence: Synthetic peptide
RASQGVRTSLA

SEQ ID NO: 2042 - protein, 11 aa, Artificial Sequence
  Description of Artificial Sequence: Synthetic peptide
GASQTIERRLN

SEQ ID NO: 2043 - protein, 7 aa, Artificial Sequence
  Description of Artificial Sequence: Synthetic peptide
DASSLHT

SEQ ID NO: 2044 - protein, 7 aa, Artificial Sequence
  Description of Artificial Sequence: Synthetic peptide
GKNNRPT

SEQ ID NO: 2045 - protein, 7 aa, Artificial Sequence
  Description of Artificial Sequence: Synthetic peptide
DNSSRQT

SEQ ID NO: 2046 - protein, 7 aa, Artificial Sequence
  Description of Artificial Sequence: Synthetic peptide
HTSRLQS

SEQ ID NO: 2047 - protein, 7 aa, Artificial Sequence
  Description of Artificial Sequence: Synthetic peptide
AKNNRPS

SEQ ID NO: 2048 - protein, 7 aa, Artificial Sequence
  Description of Artificial Sequence: Synthetic peptide
HTSRLQS

SEQ ID NO: 2049 - protein, 7 aa, Artificial Sequence
  Description of Artificial Sequence: Synthetic peptide
KTTWLHS

SEQ ID NO: 2050 - protein, 7 aa, Artificial Sequence
  Description of Artificial Sequence: Synthetic peptide
GKNIRPS

SEQ ID NO: 2051 - protein, 7 aa, Artificial Sequence
  Description of Artificial Sequence: Synthetic peptide
RISWLQS

SEQ ID NO: 2052 - protein, 7 aa, Artificial Sequence
  Description of Artificial Sequence: Synthetic peptide
AKNNRPS

SEQ ID NO: 2053 - protein, 7 aa, Artificial Sequence
  Description of Artificial Sequence: Synthetic peptide
AINNRPS

SEQ ID NO: 2054 - protein, 7 aa, Artificial Sequence
  Description of Artificial Sequence: Synthetic peptide
HTSTLQS

SEQ ID NO: 2055 - protein, 7 aa, Artificial Sequence
  Description of Artificial Sequence: Synthetic peptide
HTSRLQS

SEQ ID NO: 2056 - protein, 7 aa, Artificial Sequence
  Description of Artificial Sequence: Synthetic peptide
GKNIRPS

SEQ ID NO: 2057 - protein, 7 aa, Artificial Sequence
  Description of Artificial Sequence: Synthetic peptide
HKSRLQS

SEQ ID NO: 2058 - protein, 7 aa, Artificial Sequence
  Description of Artificial Sequence: Synthetic peptide
DTSSRHT

SEQ ID NO: 2059 - protein, 7 aa, Artificial Sequence
  Description of Artificial Sequence: Synthetic peptide
RTSWLQS

SEQ ID NO: 2060 - protein, 7 aa, Artificial Sequence
  Description of Artificial Sequence: Synthetic peptide
RASTLAS

SEQ ID NO: 2061 - protein, 7 aa, Artificial Sequence
  Description of Artificial Sequence: Synthetic peptide
ANNNRAS

SEQ ID NO: 2062 - protein, 7 aa, Artificial Sequence
  Description of Artificial Sequence: Synthetic peptide
DKNSLQT

SEQ ID NO: 2063 - protein, 7 aa, Artificial Sequence
  Description of Artificial Sequence: Synthetic peptide
GKNIRPS

SEQ ID NO: 2064 - protein, 7 aa, Artificial Sequence
  Description of Artificial Sequence: Synthetic peptide
GKNIRPS

SEQ ID NO: 2065 - protein, 7 aa, Artificial Sequence
  Description of Artificial Sequence: Synthetic peptide
HTSRLQS

SEQ ID NO: 2066 - protein, 7 aa, Artificial Sequence
  Description of Artificial Sequence: Synthetic peptide
DASSLHT

SEQ ID NO: 2067 - protein, 7 aa, Artificial Sequence
  Description of Artificial Sequence: Synthetic peptide
GTTSLES

SEQ ID NO: 2068 - protein, 7 aa, Artificial Sequence
  Description of Artificial Sequence: Synthetic peptide
ENNNRPS

SEQ ID NO: 2069 - protein, 7 aa, Artificial Sequence
  Description of Artificial Sequence: Synthetic peptide
HTSRLQS

SEQ ID NO: 2070 - protein, 7 aa, Artificial Sequence
  Description of Artificial Sequence: Synthetic peptide
DASSLHT

SEQ ID NO: 2071 - protein, 7 aa, Artificial Sequence
  Description of Artificial Sequence: Synthetic peptide
ENNNRPS

SEQ ID NO: 2072 - protein, 7 aa, Artificial Sequence
  Description of Artificial Sequence: Synthetic peptide
RASTLAS

SEQ ID NO: 2073 - protein, 7 aa, Artificial Sequence
  Description of Artificial Sequence: Synthetic peptide
HTSRLQD

SEQ ID NO: 2074 - protein, 7 aa, Artificial Sequence
  Description of Artificial Sequence: Synthetic peptide
HTSRLQS

SEQ ID NO: 2075 - protein, 7 aa, Artificial Sequence
  Description of Artificial Sequence: Synthetic peptide
GKNNRPT

SEQ ID NO: 2076 - protein, 7 aa, Artificial Sequence
  Description of Artificial Sequence: Synthetic peptide
KVSNRFS

SEQ ID NO: 2077 - protein, 7 aa, Artificial Sequence
  Description of Artificial Sequence: Synthetic peptide
RTSWLQS

SEQ ID NO: 2078 - protein, 7 aa, Artificial Sequence
  Description of Artificial Sequence: Synthetic peptide
RTTWLQS

SEQ ID NO: 2079 - protein, 7 aa, Artificial Sequence
  Description of Artificial Sequence: Synthetic peptide
GKNIRPI

SEQ ID NO: 2080 - protein, 7 aa, Artificial Sequence
  Description of Artificial Sequence: Synthetic peptide
AKNNRPS

SEQ ID NO: 2081 - protein, 7 aa, Artificial Sequence
  Description of Artificial Sequence: Synthetic peptide
GKNIRPS

SEQ ID NO: 2082 - protein, 7 aa, Artificial Sequence
  Description of Artificial Sequence: Synthetic peptide
HTSRLQS

SEQ ID NO: 2083 - protein, 7 aa, Artificial Sequence
  Description of Artificial Sequence: Synthetic peptide
AASSLYS

SEQ ID NO: 2084 - protein, 7 aa, Artificial Sequence
  Description of Artificial Sequence: Synthetic peptide
GKNIRPS

SEQ ID NO: 2085 - protein, 7 aa, Artificial Sequence
  Description of Artificial Sequence: Synthetic peptide
HTSTLQS

SEQ ID NO: 2086 - protein, 7 aa, Artificial Sequence
  Description of Artificial Sequence: Synthetic peptide
QMSHLAS

SEQ ID NO: 2087 - protein, 7 aa, Artificial Sequence
  Description of Artificial Sequence: Synthetic peptide
AKNNRPS

SEQ ID NO: 2088 - protein, 7 aa, Artificial Sequence
  Description of Artificial Sequence: Synthetic peptide
QMSHLAS

SEQ ID NO: 2089 - protein, 7 aa, Artificial Sequence
  Description of Artificial Sequence: Synthetic peptide
AKNNRPS

SEQ ID NO: 2090 - protein, 7 aa, Artificial Sequence
  Description of Artificial Sequence: Synthetic peptide
ALNNRPS

SEQ ID NO: 2091 - protein, 7 aa, Artificial Sequence
  Description of Artificial Sequence: Synthetic peptide
DASSLHT

SEQ ID NO: 2092 - protein, 11 aa, Artificial Sequence [sequence omitted]

SEQ ID NO: 2093 - protein, 11 aa, Artificial Sequence
  Description of Artificial Sequence: Synthetic peptide
CQQSLAPPYTF

SEQ ID NO: 2094 - protein, 11 aa, Artificial Sequence [sequence omitted]

SEQ ID NO: 2095 - protein, 11 aa, Artificial Sequence
  Description of Artificial Sequence: Synthetic peptide
CQQYTYFPATF

SEQ ID NO: 2096 - protein, 11 aa, Artificial Sequence [sequence omitted]

SEQ ID NO: 2097 - protein, 11 aa, Artificial Sequence
  Description of Artificial Sequence: Synthetic peptide
CQQFAYFPATF

SEQ ID NO: 2098 - protein, 11 aa, Artificial Sequence
  Description of Artificial Sequence: Synthetic peptide
CRHRSSYLPTF

SEQ ID NO: 2099 - protein, 11 aa, Artificial Sequence
  Description of Artificial Sequence: Synthetic peptide
CQQYASVPVTF

SEQ ID NO: 2100 - protein, 14 aa, Artificial Sequence
  Description of Artificial Sequence: Synthetic peptide
CVARPLRGNPHVLF

SEQ ID NO: 2101 - protein, 11 aa, Artificial Sequence [sequence omitted]

SEQ ID NO: 2102 - protein, 11 aa, Artificial Sequence [sequence omitted]

SEQ ID NO: 2103 - protein, 7 aa, Artificial Sequence
  Description of Artificial Sequence: Synthetic peptide
CQQYRLF

SEQ ID NO: 2104 - protein, 8 aa, Artificial Sequence
  Description of Artificial Sequence: Synthetic peptide
CQQYTYFF

SEQ ID NO: 2105 - protein, 11 aa, Artificial Sequence
  Description of Artificial Sequence: Synthetic peptide
CQQYASVPVTF

SEQ ID NO: 2106 - protein, 11 aa, Artificial Sequence
  Description of Artificial Sequence: Synthetic peptide
CQQFAYFPATF

SEQ ID NO: 2107 - protein, 11 aa, Artificial Sequence [sequence omitted]

SEQ ID NO: 2108 - protein, 11 aa, Artificial Sequence
  Description of Artificial Sequence: Synthetic peptide
CQQRSSYPPTF

SEQ ID NO: 2109 - protein, 11 aa, Artificial Sequence
  Description of Artificial Sequence: Synthetic peptide
CQQFAYFPATF

SEQ ID NO: 2110 - protein, 11 aa, Artificial Sequence [sequence omitted]

SEQ ID NO: 2111 - protein, 11 aa, Artificial Sequence [sequence omitted]

SEQ ID NO: 2112 - protein, 11 aa, Artificial Sequence
  Description of Artificial Sequence: Synthetic peptide
CQQYASVPVTF

SEQ ID NO: 2113 - protein, 11 aa, Artificial Sequence
  Description of Artificial Sequence: Synthetic peptide
CQQYASVPVTF

SEQ ID NO: 2114 - protein, 11 aa, Artificial Sequence
  Description of Artificial Sequence: Synthetic peptide
CQQFASFPATF

SEQ ID NO: 2115 - protein, 11 aa, Artificial Sequence [sequence omitted]

SEQ ID NO: 2116 - protein, 11 aa, Artificial Sequence
  Description of Artificial Sequence: Synthetic peptide
CQQSYSTPRTF

SEQ ID NO: 2117 - protein, 11 aa, Artificial Sequence [sequence omitted]

SEQ ID NO: 2118 - protein, 11 aa, Artificial Sequence
  Description of Artificial Sequence: Synthetic peptide
CQQVVWRPFTF

SEQ ID NO: 2119 - protein, 11 aa, Artificial Sequence [sequence omitted]

SEQ ID NO: 2120 - protein, 11 aa, Artificial Sequence [sequence omitted]

SEQ ID NO: 2121 - protein, 11 aa, Artificial Sequence
  Description of Artificial Sequence: Synthetic peptide
CQQGYTLPWTF

SEQ ID NO: 2122 - protein, 6 aa, Artificial Sequence
  Description of Artificial Sequence: Synthetic peptide
CQQLAF

SEQ ID NO: 2123 - protein, 11 aa, Artificial Sequence
  Description of Artificial Sequence: Synthetic peptide
CQQFAYFPATF

SEQ ID NO: 2124 - protein, 11 aa, Artificial Sequence [sequence omitted]

SEQ ID NO: 2125 - protein, 11 aa, Artificial Sequence
  Description of Artificial Sequence: Synthetic peptide
CQQYDAYPPTL

SEQ ID NO: 2126 - protein, 11 aa, Artificial Sequence
  Description of Artificial Sequence: Synthetic peptide
CQQRSSYSATF

SEQ ID NO: 2127 - protein, 14 aa, Artificial Sequence
  Description of Artificial Sequence: Synthetic peptide
CVARAVRGNPLVLF

SEQ ID NO: 2128 - protein, 11 aa, Artificial Sequence
  Description of Artificial Sequence: Synthetic peptide
CGQSYRYRLTF

SEQ ID NO: 2129 - protein, 11 aa, Artificial Sequence [sequence omitted]

SEQ ID NO: 2130 - protein, 11 aa, Artificial Sequence
  Description of Artificial Sequence: Synthetic peptide
CQQSYELPLTF

SEQ ID NO: 2131 - protein, 11 aa, Artificial Sequence
  Description of Artificial Sequence: Synthetic peptide
CQQFAYFPATF

SEQ ID NO: 2132 - protein, 11 aa, Artificial Sequence [sequence omitted]

SEQ ID NO: 2133 - protein, 11 aa, Artificial Sequence
  Description of Artificial Sequence: Synthetic peptide
CQQYASVPVTF

SEQ ID NO: 2134 - protein, 11 aa, Artificial Sequence
  Description of Artificial Sequence: Synthetic peptide
CQQFAYFPATF

SEQ ID NO: 2135 - protein, 10 aa, Artificial Sequence [sequence omitted]

SEQ ID NO: 2136 - protein, 11 aa, Artificial Sequence [sequence omitted]

SEQ ID NO: 2137 - protein, 10 aa, Artificial Sequence [sequence omitted]

SEQ ID NO: 2138 - protein, 11 aa, Artificial Sequence [sequence omitted]

SEQ ID NO: 2139 - protein, 11 aa, Artificial Sequence [sequence omitted]

SEQ ID NO: 2140 - protein, 11 aa, Artificial Sequence [sequence omitted]

SEQ ID NO: 2141 - protein, 117 aa, Artificial Sequence
  Description of Artificial Sequence: Synthetic polypeptide
EVQLLESGGGLVQPGGSLRLSCAASGFTFSNYGVSWVRQAPGKGLEWVGYINPSRGYTYYADSVKGRFTISRDNSKNTLYLQMNSLRAEDTAVYYCARSYGGGFDYWGQGTLVTVSS

SEQ ID NO: 2142 - protein, 117 aa, Artificial Sequence
  Description of Artificial Sequence: Synthetic polypeptide
EVQLLESGGGLVQPGGSLRLSCAASGFTFVRYDMAWVRQAPGKGLEWVSTISSGGDYTYYPDSVKGRFTISRDNSKNTLYLQMNSLRAEDTAVYYCAKDTYNHFDYWGQGTLVTVSS

SEQ ID NO: 2143 - protein, 117 aa, Artificial Sequence
  Description of Artificial Sequence: Synthetic polypeptide
EVQLLESGGGLVQPGGSLRLSCAASGFTFSKYGMSWVRQAPGKGLEWVSYINSSRGYTYYADSVKGRFTISRDNSKNTLYLQMNSLRAEDTAVYYCARSSGGGFDYWGQGTLVTVSS

SEQ ID NO: 2144 - protein, 119 aa, Artificial Sequence
  Description of Artificial Sequence: Synthetic polypeptide
EVQLLESGGGLVQPGGSLRLSCAASGFTFSRYFMGWVRQAPGKGLEWVSEISPSGKKKYYADSVKGRFTISRDNSKNTLYLQMNSLRAEDTAVYYCAKSSFDKYNFDYWGQGTLVTVSS

SEQ ID NO: 2145 - protein, 117 aa, Artificial Sequence
  Description of Artificial Sequence: Synthetic polypeptide
EVQLLESGGGLVQPGGSLRLSCAASGFTFHKYGMTWVRQAPGKGLEWVSAISSGGGYTYYPDSVKGRFTISRDNSKNTLYLQMNSLRAEDTAVYYCARDTYLHFDYWGQGTLVTVSS

SEQ ID NO: 2146 - protein, 119 aa, Artificial Sequence
  Description of Artificial Sequence: Synthetic polypeptide
EVQLLESGGGLVQPGGSLRLSCAASGFTFSRYVMGWVRQAPGKGLEWVSEISPSGKKKYYADSVKGRFTISRDNSKNTLYLQMNSLRAEDTAVYYCAKSSFDKYNFDYWGQGTLVTVSS

SEQ ID NO: 2147 - protein, 119 aa, Artificial Sequence
  Description of Artificial Sequence: Synthetic polypeptide
EVQLLESGGGLVQPGGSLRLSCAASGFTFSTYAMNWVRQAPGKGLEWVTEISPSGKKKYYADSVKGRFTISRDNSKNTLYLQMNSLRAEDTAVYYCAKSSFDKYNFDYWGQGTLVTVSS

SEQ ID NO: 2148 - protein, 115 aa, Artificial Sequence
  Description of Artificial Sequence: Synthetic polypeptide
EVQLLESGGGLVQPGGSLRLSCAASGCTFSSYLMSWVRQAPVKGLEWVGVIWGGGGTYYADSVKGRFTISRDNSKNTLYLQMNSLRAEDTAVYYCAKGGTSFDYWGQGTLVTVSS

SEQ ID NO: 2149 - protein, 120 aa, Artificial Sequence
  Description of Artificial Sequence: Synthetic polypeptide
EVQLLESGGGLVQPGGSLRLSCAASGFTFNAYPMTWVRQAPGKGLEWVSGITGSGGSTYYADSVKGGFTISRVNSKNTLYLQMNSLRTEDTAVYYCARDGSYSSSWYGYWGQGTLVTVSS

SEQ ID NO: 2150 - protein, 117 aa, Artificial Sequence
  Description of Artificial Sequence: Synthetic polypeptide
EVQLLESGGGLVQPGGSLRLSCAASGFTFHKYGMACVRQAHEKGLEWVSTISSGGGYTYYPDSVKGRLTISRDNSKNTLYLQMNSLRAEDTAVYYCARDTYLHFEYWGQGTLVTVSS

SEQ ID NO: 2151 - protein, 117 aa, Artificial Sequence
  Description of Artificial Sequence: Synthetic polypeptide
EVQLLESGGGLVQPGGSLRLSCAASGFTFHKYGMAWVRQAPGKGLEWVSTISSGGGYTYYPDSVKGRFTISRDNSKNTLYLQMNSLRAEDTAVYYCARDTYLHFDYWGQGTLVTVSS

SEQ ID NO: 2152 - protein, 119 aa, Artificial Sequence
  Description of Artificial Sequence: Synthetic polypeptide
EVQLLESGGGLVQPGGSLRLSCAASGFTFSPYSMSWVRQAPGKGLEWVSEISPSGKKKYYADSVKGRFTISRDNSKNTLYLQMNSLRAEDTAVYYCARSSFDKYNFDYWGQGTLVTVSS

SEQ ID NO: 2153 - protein, 119 aa, Artificial Sequence; identical to SEQ ID NO: 2144
  Description of Artificial Sequence: Synthetic polypeptide

SEQ ID NO: 2154 - protein, 115 aa, Artificial Sequence
  Description of Artificial Sequence: Synthetic polypeptide
EVQLLESGGGLVQPGGSLRLSCAASGFTFSSYFMSWVRQAPGKGLEWVGVIWGGGGTYYADSVKGRFTISRDNSKNTLYLQMNSLRAEDTAVYYCAKGGTSFDYWGQGTLVTVSS

SEQ ID NO: 2155 - protein, 119 aa, Artificial Sequence
  Description of Artificial Sequence: Synthetic polypeptide
EVQLLESGGGLVQPGGSLRLSCAASGFTFSRYIMGWVRQAPRKGLKWVSEISLIGKKKYYADSVKGRFTISRDNSKNTLYLQMNSLRAEDTAVYYCAKSSFDKYNFDYWGQGTLVTVSS

SEQ ID NO: 2156 - protein, 117 aa, Artificial Sequence
  Description of Artificial Sequence: Synthetic polypeptide
EVQLLESGGGLVQPGGSLRLSCAASGFTFSNYGVSWVRQAPGKGLEWVGYINRSREYTYYADSVKGRFTISRDNSKNTLYLQMNSLRAEDTAVYYCARSYGGGFDYWGQGTLVTVSS

SEQ ID NO: 2157 - protein, 119 aa, Artificial Sequence
  Description of Artificial Sequence: Synthetic polypeptide
EVQLLESGGGLVQPGGSLRLSCAASGFTFSRYAMNWVRQAPGKGLEWVSEISPSGKKKYYADSVKGRFTISRDNSKNTLYLQMNSLRAEDTAVYYCAKSSFDKYNFDYWGQGTLVTVSS

SEQ ID NO: 2158 - protein, 119 aa, Artificial Sequence
  Description of Artificial Sequence: Synthetic polypeptide
EVQLLESGGGLVQPGGSLRLSCAASGFTFSRYFMGWVRQAPGKGLEWVSEISPSGKKKYYAESVKGRFTISRDNSKNTLYLQMNSLRAEDTAVYYCAKSSFDKYNFDYWGQGTLVTVSS

SEQ ID NO: 2159 - protein, 117 aa, Artificial Sequence
  Description of Artificial Sequence: Synthetic polypeptide
EVQLLESGGGLVQPGGSLRLSCAASGFTFHKYGMAWVRQAPGKGLEWVSTISGGGGYTYYPDSVKGRFTISRDNSKNTLYLQMNSLRAEDTAVYYCARDTYLHFDYWGQGTLVTVSS

SEQ ID NO: 2160 - protein, 117 aa, Artificial Sequence
  Description of Artificial Sequence: Synthetic polypeptide
EVQLLESGGGLVQPGGSLRLSCAASGFTFSKYGVSWVRQAPGKGLEWVCYINSGSGYTYYADSVKGRFTISRDNSKNTLYLQMNSLRAEDTAVYYCARASYVHFDYWGQGTLVTVSS

SEQ ID NO: 2161 - protein, 115 aa, Artificial Sequence
  Description of Artificial Sequence: Synthetic polypeptide
EVQLLESGGGLVQPGGSLRLSCAASGFTFSSYFMSWVRQAPGKGLECVGVIWGGGGTYYADSVKGRFTISRDNSKNTLYLQMNSLRAEDTAVYYCAKGGTSFDYWGQGTLVTVSS

SEQ ID NO: 2162 - protein, 115 aa, Artificial Sequence
  Description of Artificial Sequence: Synthetic polypeptide
EVQLLESGGGLVQPGGSLRLSCAASGFTFSSYLMSWIRQAPGKGLEWVGVIWGGGGTYYADSVKGRFTISRDNSKNTLYLQMNSLRAEDTAVYYCAKGGTSFDYWGQGTLVTVSS

SEQ ID NO: 2163 - protein, 119 aa, Artificial Sequence
  Description of Artificial Sequence: Synthetic polypeptide
EVQLLESGGGLVQPGGSLRLSCAASGFTFSRYVMNWVRQAPGKGLEWVSEISPSGKKKYYADSVKGRFTISRDNSKNTLYLQMNSLRAEDTAVYYCAKSSFDKYNFDYWGQGTLVTVSS

SEQ ID NO: 2164 - protein, 117 aa, Artificial Sequence; identical to SEQ ID NO: 2141
  Description of Artificial Sequence: Synthetic polypeptide

SEQ ID NO: 2165 - protein, 118 aa, Artificial Sequence
  Description of Artificial Sequence: Synthetic polypeptide
EVQLLESGGGLVQPGGSLRLSCAASGFTFEDETMSWVRQAPGKGLEWVSAISGSGGGTSYADSVKGRFTISRDNSKNTLYLQMNSLRAEDTAVYYCARDVIAGPFDYWGQGTLVTVSS

SEQ ID NO: 2166 - protein, 116 aa, Artificial Sequence
  Description of Artificial Sequence: Synthetic polypeptide
EVQLLESGGGLVQPGGSLRLSCAASGFTFSNYGVSWVRQAPGKGLEWVSWISPHGALTYYADSVKGRFTISRDNSKNTLYLQMNSLKAEDTAVYYCAKGRRRFDYWGQGTLVTVSS

SEQ ID NO: 2167 - protein, 116 aa, Artificial Sequence
  Description of Artificial Sequence: Synthetic polypeptide
EVQLLESGGGLVQPGGSLRLSCAASGFTFSNYGVSWVRQAPGKGLEWVSSIDWHGWVTYYADSVKGRFTISRDNSKNTLYLQMNSLRAEDTAVYYCVKNALRFDYWGQGTLVTVSS

SEQ ID NO: 2168 - protein, 117 aa, Artificial Sequence
  Description of Artificial Sequence: Synthetic polypeptide
EVQLLESGGGLVQPGGSLRLSCAASGFTFSNYGVSWVRQAHGKGLEWVVYINPSRGYTYYADSVKGRFSISRDNSKNTLYLQMNSLRAEDTAVYYCARSYGGGFDYWGQGTLVTVSS

SEQ ID NO: 2169 - protein, 116 aa, Artificial Sequence; identical to SEQ ID NO: 2166
  Description of Artificial Sequence: Synthetic polypeptide

SEQ ID NO: 2170 - protein, 117 aa, Artificial Sequence
  Description of Artificial Sequence: Synthetic polypeptide
EVQLLESGGGLVQPGGSLRLSCAASGFTFNAYPMTWVRQAPGKGLEWVSAITGSGGSTYYADSVKGRFTISRDNSKNTLYLQMNSLRAEDTAVYYCARVWRNHLDYWGQGTLVTVSS

SEQ ID NO: 2171 - protein, 124 aa, Artificial Sequence
  Description of Artificial Sequence: Synthetic polypeptide
EVQLLESGGGLVQPGGSLRLSCAASGFTFEHNDMHWVRQAPGKGLEWVSGISPSGGITTYADSVKGRFTISRDNSKNTLYLQMNSLRAEDTAVYYCAKQAPGEKWLARGRLDYWGQGTLVTVSS

SEQ ID NO: 2172 - protein, 119 aa, Artificial Sequence
  Description of Artificial Sequence: Synthetic polypeptide
EVQLLESGGGLVQPGGSLRLSCAASDLHSRSYVMGWVRQAPGKGLEWVSEISRSGKKKYYADSVKGRFTISRDNSKNTLYLQMNSLRAEDTAVYYCAKSSFGEYNFDYWGQGTLVTVSS

SEQ ID NO: 2173 - protein, 117 aa, Artificial Sequence
  Description of Artificial Sequence: Synthetic polypeptide
EVQLLESGGGLVQPGGSLRLSCAASGFTFDKYDMAWVRQAPGKGLEWVSTICSGGDYTYYPDSVKGRFTISRDNSKNTLYLQMNSLRAEDTAVYYCARDTYIHFDYWGQGTLVTVSS

SEQ ID NO: 2174 - protein, 118 aa, Artificial Sequence
  Description of Artificial Sequence: Synthetic polypeptide
EVQLLESGGGLVQPGGSLRLSCAASGFTFNKYPMMWVRQAPGKGLEWVSTIGPSGTSTYYADSVKGRFTISRDNSKNTLYLQMNSLRAEDTAVYYCARRSYFRRFDYWGQGTLVTVSS

SEQ ID NO: 2175 - protein, 119 aa, Artificial Sequence; identical to SEQ ID NO: 2157
  Description of Artificial Sequence: Synthetic polypeptide

SEQ ID NO: 2176 - protein, 120 aa, Artificial Sequence
  Description of Artificial Sequence: Synthetic polypeptide
EVQLLESGGGLVQPGGSLRLSCAASGFTFNADPMSWVRQAPGKGLEWVSAITGSGGSTYYADSVKGRFTISRDNSKNTLYLQMNSLRAEDTAVYYCARDGSYSSSWYGYWGQGTLVTVSS

SEQ ID NO: 2177 - protein, 117 aa, Artificial Sequence
  Description of Artificial Sequence: Synthetic polypeptide
EVQLLESGGGLVQPGGSLRLSCAASGFTFEVYTMAWVRQAPGKGLEWVSSIHPKGYPTRYADSVKGRFTISRDNSKNTLYLQMNSLRAEDTAVYYCAKGWFGNFDYWGQGTLVTVSS

SEQ ID NO: 2178 - protein, 117 aa, Artificial Sequence
  Description of Artificial Sequence: Synthetic polypeptide
EVQLLESGGGLVQPGGSLRLSCAASGFTFHKYGMTWVRQAPGKGLEWVSSISSGGGYTYYPDSVKGRFTISRDNSKNTLYLQMNSLRAEDTAVYYCARDTYLHFDYWGQGTLVTVSS

SEQ ID NO: 2179 - protein, 116 aa, Artificial Sequence
  Description of Artificial Sequence: Synthetic polypeptide
EVQLLESGGGLVQPGGSLRLSCAASGFTFNKYPMMWVRQAPGKGLEWVSGITRSGSTNYRDSVKGRFTISRDNSKNTLYLQMNSLRAEDTAVYYCAKKLSNGFDYWGQGTLVTVSS

SEQ ID NO: 2180 - protein, 119 aa, Artificial Sequence
  Description of Artificial Sequence: Synthetic polypeptide
EVQLLESGGGLVQPGGSLRLSCAASASSVSRYVMGCVGQARGKGLKWVSEISRIGKKKCYADSVKGRFAISRDNCKNTLYLQMNSMRAEDTAVYYCEKSSFDKYNFDYWGQGTLVTVSS

SEQ ID NO: 2181 - protein, 121 aa, Artificial Sequence
  Description of Artificial Sequence: Synthetic polypeptide
EVQLLESGGGLVQPGGSLRLSCAASGFTFPVYNMAWVRQAPGKGLEWVSGIYPSGGSTVYADSVKGRFTISRDNSKNTLYLQMNSLRAEDTAVYYCARHRAGSSGWYSDYWGQGTLVTVSS

SEQ ID NO: 2182 - protein, 115 aa, Artificial Sequence
  Description of Artificial Sequence: Synthetic polypeptide
EVQLLESGGGLVQPGGSLRLSCAASGFTFSSYFMSWVRQAPGKGLEWVGVIWGGGGTYYADSVKGRFTIYRDNSKNTLYLQMNSLRAEDTAVYYCAKGGTSFDYWGQGTLVTVSS

SEQ ID NO: 2183 - protein, 119 aa, Artificial Sequence
  Description of Artificial Sequence: Synthetic polypeptide
EVQLLESGGGLVQPGGSLRLSCAASGFTFSRYFMGWVRQAPGKGLEWVSEISPSGKKKYYADSVKGRFTISRDNSKNTLYLQMNSLRAEDTAVYYCAKSSFDKYNFHYWGQGTLVTVSS

SEQ ID NO: 2184 - protein, 116 aa, Artificial Sequence
  Description of Artificial Sequence: Synthetic polypeptide
EVQLLESGGGLVQPGGSLRLSCAASGFTFEPVIMGWVRQAPGKGLEWVSSISPNGWDTYYADSVKGRFTISRDNSKNTLYLQMNSLRAEDTAVYYCATETSPNDYWGQGTLVTVSS

SEQ ID NO: 2185 - protein, 117 aa, Artificial Sequence
  Description of Artificial Sequence: Synthetic polypeptide
EVQLLESGGGLVQPGGSLRLSCAASGFTFHKYGMAWVRQAPGKGLEWVSTISSGGGYTYYPDSVKGRFTISRDNSKNTLYLQMNSLRAEDTAVYHCARDTYLHFDYWGQGTLVTVSS

SEQ ID NO: 2186 - protein, 116 aa, Artificial Sequence; identical to SEQ ID NO: 2184
  Description of Artificial Sequence: Synthetic polypeptide

SEQ ID NO: 2187 - protein, 117 aa, Artificial Sequence; identical to SEQ ID NO: 2151
  Description of Artificial Sequence: Synthetic polypeptide

SEQ ID NO: 2188 - protein, 117 aa, Artificial Sequence; identical to SEQ ID NO: 2151
  Description of Artificial Sequence: Synthetic polypeptide

SEQ ID NO: 2189 - protein, 117 aa, Artificial Sequence; identical to SEQ ID NO: 2141
  Description of Artificial Sequence: Synthetic polypeptide

SEQ ID NO: 2190 - protein, 107 aa, Artificial Sequence
  Description of Artificial Sequence: Synthetic polypeptide
DIQMTQSPSSLSASVGDRVTITCRASQTIERRLNWYQQKPGKAPKLLIYDASSLHTGVPSRFSGSGSGTDFTLTISSLQPEDFATYYCQQSYIIPPTFGQGTKVEIK

SEQ ID NO: 2191 - protein, 107 aa, Artificial Sequence
  Description of Artificial Sequence: Synthetic polypeptide
DIQMTQSPSSLSASVGDRVTITCRASHGVRTSLAWYQQKPGKAPKLLIYGKNNRPTGVPSRFSGSGSGTDFTLTISSLQPEDFATYYCQQSLAPPYTFGQGTKVEIK

SEQ ID NO: 2192 - protein, 107 aa, Artificial Sequence
  Description of Artificial Sequence: Synthetic polypeptide
DIQMTQSPSSLSASVGDRVTITCRATQAIERRLKWYQQKPGKAPKLLIYDNSSRQTGVPSRFSGSGSGTDFTLTISSLQPEDFATYYCQQSYIIPYTFGQGTKVEIK

SEQ ID NO: 2193 - protein, 107 aa, Artificial Sequence
  Description of Artificial Sequence: Synthetic polypeptide
DIQMTQSPSSLSASVGDRVTITCSASQDINKYLNWYQQKPGKAPKLLIYHTSRLQSGVPSRFSGSGSGTDFTLTISSLQPEDFATYYCQQYTYFPATFGQGTNVEIK

SEQ ID NO: 2194 - protein, 107 aa, Artificial Sequence; identical to SEQ ID NO: 1599
  Description of Artificial Sequence: Synthetic polypeptide

SEQ ID NO: 2195 - protein, 107 aa, Artificial Sequence
  Description of Artificial Sequence: Synthetic polypeptide
DIQMTQSPSSLSASVGDRVTITCSASHDINEYLNWYQQKPGKAPKLLIYHTSRLQSGVPSRFSGSESVTDFTLTISSLQPEDFATYYCQQFAYFPATFGQGTKVEIK

SEQ ID NO: 2196 - protein, 107 aa, Artificial Sequence
  Description of Artificial Sequence: Synthetic polypeptide
DIQMTPSPSSLSASVGDKITITCRPAHNIGNFLNWYQQKPRKAPKLLIYKTTWLHSSVPSSISGGGSATDYTLTIISLQPADYATYYCRHRSSYLPTFGQGTKVEIK

SEQ ID NO: 2197 - protein, 107 aa, Artificial Sequence
  Description of Artificial Sequence: Synthetic polypeptide
DIQMTQSPSSLSASVGDRVTITCRASQNIRSYLNWYQQKPGKAPKLLIYGKNIRPSGVPSRFSGSGSGTDFTLTISSLQPEDFATYYCQQYASVPVTFGQGTKVEIK

SEQ ID NO: 2198 - protein, 110 aa, Artificial Sequence
  Description of Artificial Sequence: Synthetic polypeptide
DIQMTQYPSSLSASVGDRVTIICSGNKLGDKYASWFQQKPGKARKLLIYRISWLQSGVPARFSGSGSGTDFTVTISSMHREDFATYYCVARPLRGNPHVLFGQGTKVEIK

SEQ ID NO: 2199 - protein, 107 aa, Artificial Sequence; identical to SEQ ID NO: 1599
  Description of Artificial Sequence: Synthetic polypeptide

SEQ ID NO: 2200 - protein, 107 aa, Artificial Sequence
  Description of Artificial Sequence: Synthetic polypeptide
DIQMTQSPSSLSASVGDRVTITCRASQGVRTSLAWYQQKPGKAPKLLIYAINNRPSGVPSRFSGSGSGTDFTLTISSLQPEDFATYYCQQSYSAPYTFGQGTKVRSK

SEQ ID NO: 2201 - protein, 103 aa, Artificial Sequence
  Description of Artificial Sequence: Synthetic polypeptide
DIQMTQSPSSLSASVGDRVTITCSASQDIRRYLNWYQQKPGKAPKLLIYHTSTLQSGVPSRFSGSGSGTDFTLTISSLQPDDFASYYCQQYRLFGQGTKVEIK

SEQ ID NO: 2202 - protein, 104 aa, Artificial Sequence
  Description of Artificial Sequence: Synthetic polypeptide
DIQMTQSPSSLSASVGDRVTITCSASQDINKYLNWYQQKPGKAPKLLIYHTSRLQSGVPSRFSGSGSGTDFTLTISSLQPEDFATYYCQQYTYFFGQGTKVEIK

SEQ ID NO: 2203 - protein, 107 aa, Artificial Sequence; identical to SEQ ID NO: 2197
  Description of Artificial Sequence: Synthetic polypeptide

SEQ ID NO: 2204 - protein, 107 aa, Artificial Sequence
  Description of Artificial Sequence: Synthetic polypeptide
DIQMTQSPSSLSASVGDRVTITCSAYQDINKYLNWYQQKPGKAPKLLIYHKSRLQSGVPSRFSGSGSGTDFTLTISSLQPEDFATYYCQQFAYFPATFGQGTKVEIK

SEQ ID NO: 2205 - protein, 107 aa, Artificial Sequence
  Description of Artificial Sequence: Synthetic polypeptide
DIQMTQSPSSLSASVGDRVTITCRASQTIERRLNWYQQKPGKAPKLLIYDTSSRHTGVPSRFSGSGSGTDFTLTISSLQPEDFATYYCQQSYIIPPTFGQGTKVEIK

SEQ ID NO: 2206 - protein, 107 aa, Artificial Sequence
  Description of Artificial Sequence: Synthetic polypeptide
DIQMTQSPSSLSASVGDRVTITCRASQDIGNFLNWYQQKPGKAPKLLIYRTSWLQSGVPSRFSGSGSGTDFTLTISSLQPEDFATYYCQQRSSYPPTFGQGTNVEIK

SEQ ID NO: 2207 - protein, 107 aa, Artificial Sequence
  Description of Artificial Sequence: Synthetic polypeptide
DIQMTQSPSSLSASVGDRVTITCRASQSISSYVNWYQQKPGKAPKLLIYRASTLASGVPSRFSGSGSGTDFTLTISSLQPEDFATYYCQQFAYFPATFGQGTKVEIK

SEQ ID NO: 2208 - protein, 107 aa, Artificial Sequence
  Description of Artificial Sequence: Synthetic polypeptide
DIQMTQSPSSLSASVGDRVTITCRASQVVSTSLSWYQQKPGKAPKLLIYANNNRASGVPSRFSGSGSGTDFTLTISSLQPEDFATYYCQQSYTAPYTFGQGTKVEIK

SEQ ID NO: 2209 - protein, 107 aa, Artificial Sequence
  Description of Artificial Sequence: Synthetic polypeptide
DIQMTQSPSSLSASVGDRVTITCRATQTIETSLKWYQQKPGKAPKLLIYDKNSLQTGVPSRFSGSGSGTDFTLTISSLQPEDFATYYCQQSYSTPHTFGQGTKVEIK

SEQ ID NO: 2210 - protein, 107 aa, Artificial Sequence; identical to SEQ ID NO: 2197
  Description of Artificial Sequence: Synthetic polypeptide

SEQ ID NO: 2211 - protein, 107 aa, Artificial Sequence; identical to SEQ ID NO: 2197
  Description of Artificial Sequence: Synthetic polypeptide

SEQ ID NO: 2212 - protein, 107 aa, Artificial Sequence
  Description of Artificial Sequence: Synthetic polypeptide
DIQMTQSPSSLSASVGDRVTITCCASQDINKFLNWYQQKPGKAPKLLIYHTSRLQSGVPSRFSGSGSGTDFTLTISSLQPEDFATYYCQQFASFPATFGQGTKVEIK

SEQ ID NO: 2213 - protein, 107 aa, Artificial Sequence
  Description of Artificial Sequence: Synthetic polypeptide
DIQMTQSPSSLSASVGDRVTITCRASQTIERRLNWYQQKPGKAPKLLIYDASSLHTGVSSRFSGSGSGTYFTLTISSLQAEDFATYYCQQSYIIPPTFGQGTKVEIK

SEQ ID NO: 2214 - protein, 109 aa, Artificial Sequence
  Description of Artificial Sequence: Synthetic polypeptide
DIQMTQSPSSLSASVGDRVTITCAASGFNIKDTYIHWYQQKPGKAPKLLIYGTTSLESGVPSRFSGSGSGTDFTLTISSLQPEDFATYYCQQSYSTPRTFGQGTKVEIK

SEQ ID NO: 2215 - protein, 107 aa, Artificial Sequence
  Description of Artificial Sequence: Synthetic polypeptide
DIQMTQSPSSLSASVGDRVTITCRASQTISSYLNWYQQKPGKAPKLLIYENNNRPSGVPSRFSGSGSGTDFTLTISSLQPEDFATYYCQQSYIIPPTFGQGTKVEIK

SEQ ID NO: 2216 - protein, 107 aa, Artificial Sequence
  Description of Artificial Sequence: Synthetic polypeptide
DIQMTQSPSSLSASVGDRVTITCSASQDINKYLNWYQQKPGKAPKLLIYHTSRLQSGVPSRFSGSGSGTDFTLTISSLQPEDFATYYCQQVVWRPFTFGQGTKVEIK

SEQ ID NO: 2217 - protein, 107 aa, Artificial Sequence; identical to SEQ ID NO: 2190
  Description of Artificial Sequence: Synthetic polypeptide

SEQ ID NO: 2218 - protein, 107 aa, Artificial Sequence
  Description of Artificial Sequence: Synthetic polypeptide
DIQMTQSPSSLSASVGDRVTITCRASQTISSYLNWYQQKPGKAPKLLIYENNNRPSGVPSRFSGSGSGTDFTLTISSLQPEDFATYYCQQSYIIPPTFGQGTNVEIK

SEQ ID NO: 2219 - protein, 107 aa, Artificial Sequence
  Description of Artificial Sequence: Synthetic polypeptide
DIQMTQSPSSLSASVGDRVTITCSGDKLGHTYTSWYQQKPGKAPKLLIYRASTLASGVPSRFSGSGSGTDFTLTISSLQPEDFATYYCQQGYTLPWTFGQGTKVEIK

SEQ ID NO: 2220 - protein, 102 aa, Artificial Sequence
  Description of Artificial Sequence: Synthetic polypeptide
DIQMTQSPSSLSASVGDRVTITCRANQNIGNFLNWYQQKPGKAPKLLIYHTSRLQDWIPSRFSASVSGTDFTLTISSLQSEDCATYYCQQLAFGQGTKVEIK

SEQ ID NO: 2221 - protein, 107 aa, Artificial Sequence; identical to SEQ ID NO: 1641
  Description of Artificial Sequence: Synthetic polypeptide

SEQ ID NO: 2222 - protein, 107 aa, Artificial Sequence
  Description of Artificial Sequence: Synthetic polypeptide
DIQMTQSPSSLSASVGDRVTITCRASHGVRTSLAWYQQKPGKAPKLLIYGKNNRPTGVPSRFSGSGSGTDFTLTISSLQPEDFATYYCQQSYSAPYTFGQGTKVEIK

SEQ ID NO: 2223 - protein, 107 aa, Artificial Sequence
  Description of Artificial Sequence: Synthetic polypeptide
DIQMTQSPSSLSASVGDRVTITCRATQSIRSFLNWYQQKPGKAPKLLIYKVSNRFSGVPSRFSGSGSGTDFTLTISSLQPEDFATYYCQQYDAYPPTLGQGTKVEIK

SEQ ID NO: 2224 - protein, 107 aa, Artificial Sequence
  Description of Artificial Sequence: Synthetic polypeptide
DIQMTQSPSSLSASVGDRVTITCRASQDIGNFLNWYQQKPGKAPKLLIYRTSWLQSGVPSRFSGSGSGTDFTLTISSLQPEDFATYYCQQRSSYSATFGQGTKVEIK

SEQ ID NO: 2225 - protein, 110 aa, Artificial Sequence
  Description of Artificial Sequence: Synthetic polypeptide
DIQMTQSPSSLSASVGDRVTITCSGNKLGDKYASWYQQKPGKAPKLLIYRTTWLQSGVPSRFSGSGSGTDFTLTISSLQPEDFATYYCVARAVRGNPLVLFGQGTKVEIK

SEQ ID NO: 2226 - protein, 107 aa, Artificial Sequence
  Description of Artificial Sequence: Synthetic polypeptide
DIQMTQSPSSLSASVGDRVTITCRASQGVRTSLAWYQQKPGKAPKLLIYGKNIRPIGVPSRFSGSGSGTDFTLTISSLQPEDFATYYCGQSYRYRLTFGQGTKVEIK

SEQ ID NO: 2227 - protein, 107 aa, Artificial Sequence; identical to SEQ ID NO: 1599
  Description of Artificial Sequence: Synthetic polypeptide

SEQ ID NO: 2228 - protein, 107 aa, Artificial Sequence
  Description of Artificial Sequence: Synthetic polypeptide
DIQMTQSPSSLSASVGDRVTITCRASQRISSFLNWYQQKPGKAPKLLIYGKNIRPSGVPSRFSGSGSGTDFTLTISSLQPEDFATYYCQQSYELPLTFGQGTKVEIK

SEQ ID NO: 2229 - protein, 107 aa, Artificial Sequence
  Description of Artificial Sequence: Synthetic polypeptide
DIQMTQSPSSLSASVGDRVTITCCASQDINKYLNWYQQKPGKAPKLLIYHTSRLQSGVPSRFSGSGSGTDFTLTISSLQPEDFATYYCQQFAYFPATFGQGTKVEIK

SEQ ID NO: 2230 - protein, 107 aa, Artificial Sequence
  Description of Artificial Sequence: Synthetic polypeptide
DIQMTQSPSSLSASVGDRVTITCRASQSVDRYFNWYQQKPGKAPKLLIYAASSLYSGVPSRFSGSGSGTDFTLTISSLQPEDFATYYCQQSYRTPLTFGQGTNVEIK

SEQ ID NO: 2231 - protein, 107 aa, Artificial Sequence; identical to SEQ ID NO: 2197
  Description of Artificial Sequence: Synthetic polypeptide

SEQ ID NO: 2232 - protein, 107 aa, Artificial Sequence
  Description of Artificial Sequence: Synthetic polypeptide
DIHMTHSPSSLSASVGDRVTITCSASQDINKYLNWYQQKPGKAPKLLIYHTSTLQSPFPSRFSGSGSGTDFTLTISSLQPEDFATYYCQQFAYFPATFGQGTKVEIK

SEQ ID NO: 2233 - protein, 111 aa, Artificial Sequence
  Description of Artificial Sequence: Synthetic polypeptide
DIQMTQSPSSLSASVGDRVTITCRSSQSLVHSTGNTYLHWYQQKPGKAPKLLIYQMSHLASGVPSRFSGSGSGTDFTLTISSLQPEDFATYYCQQSYSAPTFGQGTKVEIK

SEQ ID NO: 2234 - protein, 107 aa, Artificial Sequence; identical to SEQ ID NO: 1599
  Description of Artificial Sequence: Synthetic polypeptide

SEQ ID NO: 2235 - protein, 111 aa, Artificial Sequence
  Description of Artificial Sequence: Synthetic polypeptide
DIQMTQSPSSLSASVGDRVTITCRSSQSLVHSTGNTYLHWYQQKPGKAPKLLIYQMSHLASGVPSRFSGSGSGTDFTLTISSLQPEDFATYYCQQSYSAPTFGQGTNVEIK

SEQ ID NO: 2236 - protein, 107 aa, Artificial Sequence
  Description of Artificial Sequence: Synthetic polypeptide
DIQMTQSPSSLSASVGDRVTITCRASQGVRTSLAWYQQKPGKAPKLLIYAKNNRPSGVPSRFSGSGSGTDFTLTISSLQPEDFATYYCQQSYSVPYTFGQGTKVEIK

SEQ ID NO: 2237 - protein, 107 aa, Artificial Sequence
  Description of Artificial Sequence: Synthetic polypeptide
EIQMTQSPSSLSASVGDRVTITCRASQGVRTSLAWYQQKPRKAPKLLIYALNNRPSGVPSRFSGSGSGTDFTLTISSLQPEDFATYYCQQSYSAPYTFGQGTKVEIK

SEQ ID NO: 2238 - protein, 107 aa, Artificial Sequence
  Description of Artificial Sequence: Synthetic polypeptide
DIQMTQSPSSLSASVGDRVTITCGASQTIERRLNWYQQKPGKAPKLLIYDASSLHTGVPSRISGSGSGTDFTLTISSLQPEHFATYYCQQSYIIPPTFGQGTKVEIK

SEQ ID NO: 2239 - DNA, 62 bp, Artificial Sequence
  Description of Artificial Sequence: Synthetic oligonucleotide
  modified_base (51)..(52): Thymidine-succinyl hexamide CED phosphoramidite
agacaatcaaccatttggggtggacagccttgacctctagacttcggcattttttttttttt

SEQ ID NO: 2240 - DNA, 112 bp, Artificial Sequence
  Description of Artificial Sequence: Synthetic polynucleotide
  modified_base (101)..(102): Thymidine-succinyl hexamide CED phosphoramidite
cgggatccttatcgtcatcgtcgtacagatcccgacccatttgctgtccaccagtcatgctagccataccatgatgatgatgatgatgagaaccccgcattttttttttttt

SEQ ID NO: 2241 - DNA, 19 bp, Artificial Sequence
  Description of Artificial Sequence: Synthetic primer
atgcggggttctcatcatc

SEQ ID NO: 2242 - DNA, 20 bp, Artificial Sequence
  Description of Artificial Sequence: Synthetic primer
cgggatccttatcgtcatcg

SEQ ID NO: 2243 - protein, 6 aa, Artificial Sequence
  Description of Artificial Sequence: Synthetic 6xHis tag
HHHHHH

SEQ ID NO: 2244 - protein, 15 aa, Artificial Sequence
  Description of Artificial Sequence: Synthetic peptide
  MOD_RES (2)..(2): F, L, W, or G
  MOD_RES (4)..(4): A or S
  MOD_RES (5)..(5): A, G, S, or T
  MOD_RES (7)..(7): S, T, or N
  MOD_RES (8)..(8): W, S, R, T, or G
  MOD_RES (9)..(9): S, G, N, or D
  MOD_RES (10)..(10): G, S, or D
  MOD_RES (11)..(11): G, S, T, D, A, or N
  MOD_RES (12)..(12): G, S, T, D, or A
  MOD_RES (14)..(14): Y, N, S, or D
EXVXXIXXXXXXTXY
